United States Patent Application Publication US 2026/0191916 A1 - sequence listing, part 101

SEQ ID NO: 642 - DNA, 3016767 bp, Lacticaseibacillus paracasei (residues 1,508,385-3,016,767 of 3,016,767)
  source 1..3016767: mol_type = genomic DNA
ctcatcacgacaattttaaattaagctgatgggtgcttatttcaaaactttaaactgatcttttcgatccatgtaatctttatcttttgctgaaccttcaatggaaccaaatggcatttgtgcccgtaagttccagttggtcgggatatcaaaggcttcacgcactaaatcgtcaatgattggattatagtgctgcagattcgcgccgatgccattgttcgccaaggtgacccatgtgttaagttgtgcggaaccttgcgcctgttctgcccaagtcgcaaagtttgccgcatataatgggaaattattctccaattgctttacaacgtcagtatcggtgaaatacataatggtaccgtaagctgctttaaagctggcaattttctgcttggttgcttcgtaagcctgctcagtcggcacttcactctccagccgcttcacgacaatatcccacagcttgtcatgctgctcgccaaacagaaaaacagcgcgcgtcgtttgtgaattaaacgcagtcggcgtctcctgaatgacggtttcaatcaaatccactaagtcatccggattctgtttaacatctttgccaagtgcataaattgaccggcgttgttttaaaagattcagtaagtcttgattcacgagaaaaccacctttttataaattaaagcgtgcgctggcgcagttagaaaccggcgtgtaagcagtcttggcggtgatggccaggttttggtcattgccgccaagattcttacacgcaggtttctgcgcctgcagacgcatttcagaacaagtatcattctaccaactgactaaaagtaagtaaaccccaaatatcgacattttctttcctcctacccaaatatttcgcaaatcctcctatttgcccctccaacgtgacagcctcgcttcgcttgagtacaatgaacttattcttcttggaggtgcggtatgtcgctgattacctggcttattcttattattttggttttaaacaccttcggggcaatcttcacggttctacgcgaggtccgagatatctcaacgacttgggcgtggttgctagtgcttatttttttaccgatcgtcgggtttggtttttatttatttgctggccgcggcttatcaacgaaaaaattgcaacggattcaacacgaatatgagtctggcgtaaaagcatttgtctcactacaaaagcacgaaaacgcccggaataagttattgccaccgactgattacacgccagcggccaaggctttaaccgccttttttctgaataccgcgcaagcaccggtccttgcccataaccaagtgcaactttacacggatggcgagaaaaagtttgcggcgttattccgcgatattgaggccgctaaagattatatctatgttgagtactacaccatttacaatgatgaattaggcaatcaattccagcaactgctgatcaagaaagctaaggaaggcgttgttgtaaaggtcctatatgacgcttggggttccatgggcgctacagcaaagtggtggcgccggctgaccgacgttggcgggcaagccgaaagttactttagttccaagcatcccatcactgactttcgtttgaactatcgtgatcatcgcaagatcgttgtcattgacgaccacgtcgggtatatcggcgggtttaatgttggtgaccaatacgtctcccgcaaacctaagttcggttattggcgcgacacacatttgcgcattatcggcaatacgatttacgctttaaaaattcgcttcaccatggattggaatgcaacagtcagcaaaaaagacgaaattgcttatagtgttgaacaagatagtgccgatagtgtcactgccgacagtttgacagccggtgcaacgcctatccagatcgttgcttccggacctgaccgcccaacgcaacaaattaagttgggatacaccaagttaatcaccagtgccaccaaatctgtttggattcaaagtccttatttggtgccagatgatactgtgatcgacgctttagtatccgctgccatgtcagggattgatgttcgcatcatgattcctgacatgcctgatcacccgttcattttccgcgcgacacaatactatgcgaattatctgactcgcgctggcgtgaaaatctaccattacgaacacggctttatgcatgcgaaaacggtggttgtcgacaatgccatcgccagcgttggctcggcaaatttcgatatccgtagttttaagctgaattttgaaattaatgcgtttatttatgatcgtaaagtggccagtagcttgggccagattttcgaggctgatatggcgcgcagttacttactgacgcctgagctaatcgccaaacaaagcagttggcttcggtttaaacaagacttctcgcggttattatcacctattctttaagtaaaaactggcgctttattctgaatgatgtcagaataaagcgccagtttttactatataaagcttcattaacgttgccagtcgtccaagactttggtgtggccgactaagtaatgaatcgcggcatgaacaagttcgtcacgggcagcggtgagatcgtcaccttcaaggtcatatttatcacgcaaatagccggtggcaatcgcctgatactctttacgcgcctcaccatcatcttttaaataatcgtcaatcgcgttgatattatctttcgcccgtgtagccaattcttcggccaaatcgtcgacatgcggctgacgtttatgcgcatagtccatgagcgtgtcattcatatccacaacggcggcttcatcggcttgcttgtctcgtttcattttgtcatctcccaataaaacaagtatgcgcctgctaatccattttttaaagctggtcgtagtgcctttgctatgtgctactagctatcaaaagtagtcaggctggtgctaggcatcaaagcaaacttgaacatttcaaaaatcaattatttcagtgggctattaatttacgggaacgcgcgaataattcctgataaagttgtgaccagctttcaaaccgatcactggcaagataaaagactggtgtatctggtacaataggttcttctccaggcgcaagattttgcgccgagataacaagatcaggctgttgctcagtcgtcactagccgaatatacgcaggctgagtcaagttgagacgaacggtttcatataacggctgcggcattaaaggatcaagtgctaccttgagcttatcagcaatcgcactgtccgtcataaatggccacagcagttgatagaacccgtcaatgatctcttttgatgcattttccaatggcgcttcgcgagcgaaaaaagcctccaaggcagcttctaatcgcggataaaaaacacgcattggactcgctgttcgcgtgagatcaatataggcgccaccggggaaaatgcgctcgctgattaaaatcttcaagagattccctgccaacgctagatctgttgttactgtcggggcaatcccgacaactgttcgactgaactcgttgcggattttctcgactaactgccatgcaggtatattacgcgctgcgtgatagccaactagagtagcggcatcaaattgttgttccgagtgaaaccgaggtacgcgccactgagttaaaaaaagatgccatgtttcatcctcagcagcctttctcggcagattatcaaacgcactcggtagtgctgcagttagtgttggccgaggtgccaattcgtcaaaatcaagggtaccaacgatggagtgattcgctaacaatcggtgtagatgaacattagctgcgaatagaagctgtgcccgcgaaaaatctgattggatcagaccagctttgtcgagttcgcgcattaattgacgcgactgcggcaaaatttccgaaaacaagggatgggcaaagtcgacaaactgccacaataattgccggtaaacttgtctaacgcgggcttccggtcccataagcgctaaaggatttaggctgatggtaacgccggctttccgcaaataaaggcgcaaagccgagattcggcggaaaaaggcggctcgtgaaaacccggtttcatccaaaagcatctgcagtgtcaattgaggccgcttcagcgtctgaatcaatagttgtcccggcaaggaccgcctatatagaaagatacgataacgatctagactgattgatggtggtgcaatcatattaccatcgccgcgtcgcagtaatggtgcagcgtctgactgcatcgtgaccaagtctgcggcaatttttccatccggcgtcggagttggcggtaactctcaccacgggttatggcggtggcagcaatatccagccggtgccctggggcctcccacaacgtgctgtagatattgatgcgatctcgctcttcccgatcgagaaataattcatcaaagaccataaagaaggcctcctcgaaagcgtttgctacagtatagcaaaggtagcaaaaaacccgataagatatgctcatggttttttaagctttttttcacggtctcaactgatttttatcgcaaatatttttggtcaggttttttcgtcaataccgtgacgttgatacaaagttgctcttcagcttcaacaaatagttgacggttgcgactggttttcgccatacgaacttggtatactaaaagtaagcaaaagtgtcagccaataccatacacttggggtattcaaaaaaatagccccaagatatggtatttttaattgacagacaccccaatattgagtatcctaagctacataagataacgagaaaggatgatacctatgcgtaacatcaccttattcacacgcaatggctgcccgcaatgccggatgaccaagcgctaccttgacacccataaaattccattcacggagcacaacatcaacgaagaaccgcaatacattgattacttaaaacaaaaggggttccagcaggttcctgttcttgaagcggatgggctcgattcattctccgggttccgaccggacgccttgaagcaactggctgtttgatcagccagtttttttatcgcatcacaacgcaaccagctattataaaacgcagcgaaagcagggtttagcatgtcattaaaaacaattagtccggatcaagtcacctattacgcgctcaacaacgagatcaacattcctgtgaatgaccagattccgttgaacaaagacaaggaagcgttgcaggcatttttgaccgaaaatgtagcgccaaatacgatgcaatttgattcgctggctgatcgactgaagtatttagtcgataaccactattatgaagccgactttttgaacaagtatcagccagcttttttggaaaaactggatcaatttctttcagcgcagcattttcagttcaaatccttcatggccgcctacaaatactatgcacagtatgccttgaaaaccgatgacggtacccagtatttagaagattttaaagatcgggtttttgccaacgcacttttctttgcagacggtaacgaggacttggcagttgaccttgctgatgaaatgattcatcaacgttatcaaccggccaccccttccttcttgaatgctggccgggcccgccgtggcgaactggtttcatgttttttgttgcaaatcactgatgacatgaattcaattggccgggcgatcaattcggccttggaattatcccgaattggtggcggcgttggcctcaccttgtccaacctacgtgaagccggtgccccaattaagggcattgaaggtgccgctagcggcgtcttgccagtcatgaagctgttggaagactctttttcctatagcaaccaattgggccagcgacaaggtgccggtgttgtgtatctgaacgttttccatcctgacatcatcagtttcttaggtgccaagaaggaaaacgcggacgaaaagtaccgggttaaaacactcagtcttggcgttgtcgttccggataagtattatgacctcattaaggctaatgccgatatgtacctcttctccccttactcggttgaacgggtttacgggaagccgttctcttatgttgatatcaccaaggaatatgacaacatggttgccaatccggccattaagaagtacaagattaaggcccgtgatctagaaaacgaaatctccaaacttcagcaggaatctggttatccttatattatcaacattgatacggcaaatcgcgccaacccaatcgaaggcaaaatcatcatgagtaatctgtgctcggaaatcatgcaggttcaggtgccttccaagttgaacaataaacaggaatatgaagtgctgggtactgatgtatcttgcaacttaggtagcacgaatattcccaacctgatgcatagccgcgactttggccgcagtgtcgaagcaatggttcgtgctttgacttatgtcacggaccacagcaacatcgacgttgtaccttccgtccagcacggtaatcaccaggctcacagcattggccttggtgcgatgggcttgcacacttattttgcgaagaatcatatgttctacggttcgcctgaaagcttggacttcaccaatatttacttccttttgctgaattactacaccctgaaggcatccaataaaattgcccaggaacgcggcgaaagcttccacaacttcgaaaacagcaagtatgcggacggtagctacttcgataagtacaccgagcaagtatgggcaccgaagtatgacaaggttcgcgcgctgtttgatggcattcacattccgacgcaggctgattgggaagcgctgaagaccagtgtcatgaaagatggtctctaccatcagaaccgcatggctgttgcgccaaatgggtcgatcagttacatcaacgacaccagtgcatcattacagccgatcgttaaccgcattgaagatcggcaagaaaagaagatcggcacgatttactaccctgctccagacctttctaatgacacgatgacttactatcaaagtgcctatgatattgatatgcgtaaagtgattgacgtttacgctgctgcccagcagcatgtcgatcaaggaatggccatgacgttgttcatgcgcagtaccattccggctggcctttatccttggaaagatggccgaaccgataaaatgaccacccgtgatttaaatattttgcgtaattacgcacatcataagggcatcaagtcgatttactacatccggacttacacggatgatcaagaagaaatcggcagcaacgcttgtgaaagctgctcaatctgataatcttttaacagggggagtttcccctgtttttacataagggagcgtaaacatggcaaaacagtatattgcgatcaattggaacgcgatcgaagacgaagttgataaagcaacttgggaaaaattgacggaacaattttggttagacacccggattccgctgtccaacgacttagacgactggcgatctctcaatcatgacgagcaatgggttgtcggccacgtgttcggtggcttgaccttgttggataccctgcagagtcaggacggcatggcaagtttgcggcagaatattcgcacccagcaagaaacggctgtgttgaacaacattcagtttatggaaagtgtgcatgcaaagagttactcttcgattttttcaacgctaaacacaccagcagaaatcgatgagatcttcgattggaccaatcataacgagcatctgcaatacaaagccaacaaaattaatgatatttatcataacggttcggcgctgcagaagaagattgccagtgttttcttggaaaccttcttgttttattcaggcttctttaccccgttgtattacttgggcaacaataagctaactaacgtggcagaaatcattaagctgattattcgtgatgaaagtgttcatggcacttatatcggctataaattccagctcggattcaacgagttgccggaagctgaacaacaaacattgaaggattggatgtacgacttgttgttcgatttgtatgaaaacgaggaaaagtacactaacgatctttacgcgaagaccaactggacggatgaagttttgactttcttgcgttataacgccaacaaagccttgatgaatttaggtcaggaaacggcttttcctgacacggctgatgacgtcaacccaatcgtaatgaatgggatttcaacgtctaccgccaaccatgacttcttctcacaagttggtaatggttaccggctgggtcaagttgaagcgatgcaagatgatgattatcagttctcaactgaagatgaagaccacgacaaataaagccgtcgcggcaacaaaaaaagccactgcaatgctttgcggtggcttttttgttttggtctgattaggacgatgatcattcactgtctttaatggtttgcttcatcatactaagaaaacgttgcgcgattctggacaactcgcgatcacgtttccagacaagcgctactgggtccgctaatgctggtgctaatggtcggaaggtcaatgatgtgttaggactttgggtggccaaatattcaagacacaaggctcgtcctaagccgacagcagtcatcccaagcgcatcgacggtcaggtcataagtcccaacaatgtaagccggatccatgccttggcctaaccagtgttcaaaggtgttgcgtgcgtgcgtggcccgcggcaggattaattcactgtcgccaatgtccgttggtgtcatcaataaattatcagttaacggatcatcactggtcatcaaaataccccaagcatcacgaactggcagtagcaaactttcatactgcgtctgctgcttgccaggtcgcagtatgaaatcatacatgccggcctcaagattggccaccagcccttcatcggagccataggtaacatgaacatgcaaactggggtattgatggcgcaattcttgggcaacatgaagaaccaaccgtttgccgctggtttcgcctgcaccaatgtaaaggtcaccaccaagggcatgtttactttgcaaattattctttgtgcgctcggcaattgcggtgagttcacgtgcccggtttaacaaataggtaccatcttcagttagcgtcacacgtcgattaccacgaactagcaatttaacgccgagctctttttccaagtcttttaattggcgcgatagtccgggttgtgaaatgcccagcgttcgtgccgccgcggtaatactgccgtggtcagcaatttcaatgaagttgcgcaacgtctgcagttccataaactcccctacttcctatcagccttgtttatcgcaaacggcttcctataacaattataccctatccgacaacaattgtattccctttcacacagcaggacgcaactattttgtaagtcacgctcgccacgggtaatttatttaaatctagtcactcgcatctcttgcaaaagatcccagcctgattcaaaaaaagcaccggctgcaaatgagccgatgctaaaggattaccaaatttgaacacgtttttccggtggcaaatacatcccatcacctggttggacatcaaaagttgtgtaccaatcatcaagattgcgtggctgaatgttcgcccgcaattcgtgtggtgcatgcacatcaaccgctagtagcattttttgccgttcgaggcgagactttgaacgccaaattcttgcccagttgatgaagaaggcatgcagatcaacgtccggttctctcttggctgtatctaaagccgcagccaagccgccagcatcagcgatgttctcagaaacaacgagtttgccattaactttaccggcttcagtttcaagaccgtcaaattcttggatcatggcttcggtgagcttgttaaagtgggcataatcagccttttgccaccagttcaccatattgccaagttcgtcaaattgagcaccgttattgtcaaaaccatgggaaatttcatgggcaatgaccgcgccgataccgcccagattttcggaagcactttgtttcagggaatagaacggcgcctgcaaaatggcggctgggaaagtgatgtcgttcttggaaggatcataactggcattgaccaagtgacctggcatattccagacggtgcgatcaacaggcttggtgagcttgtcgaagttgtactgaagctcaacaagttgcatcgcgttgatattatcgatcagtgacttatccggattaacgtgcagcaaatcgtagacgtcctcaggtttatcgggataacccattttgagcaccatcttgtcgagcttaagaatcgccttgtccttggtcggttgtgatagccaatcagagttgctgagtcgccgtttgtaagtggcaatcattttttggacaagttgtgttacatcagccttcgccttttcgccaaaataagtgcggccgtagtaaatgccaattggttcgctaaagaaagcgttggctaatcggtaggcgtgtttgatttgatccggtgctttgggcgcaccggatagcgcacgactaaaagtaccgcctaattggcgcaatggttcgcttaaaagactaacaagactgtttagccgggtgacatacaaccagtcgcgataattgctgaagttagcttcgttgaacaactgcgtaaactcatccaagaaccgcggatcattcacaacgaccgtttctggcacctgtttaaagatcttttgtaagaagtcagcaaacttgaatggcttgagtttttcaacaacctccgctgtcggcatcgggttataggccttagggtaatctgcccactcttcagaactcttaatatgtttcgcaatttctgcatcaaaggccaaggcgccagctaaagttgccttttgcgcagcagcgtcaagatctgtgtaagctaaaagcttagccatcatatctttgaaaatggtcatcaattgttcgccgttttgattgcccttggcgtagtatgtggtatccggcaaaatggttcgtggacccatcaaattaatcacatttttgctggtgtctttcatgtcagcatctacgtagaaattaaatggcgggtcaatcagatgctcctgaagcagttcggctgcccgttgattgtaatccgcaaggtctttaatgccagcaaccaaatgtagttgcggcaaggctggtgcaaagcccgctgcgtctcgggtcttgaaatccttggcttgtttgtacagcgtcaccgcagatgcaaaatacttgtctggcgtcgtttttttgccgtcagcaatcgctgaaaaatcagccatcattttttcttcgacttcatcggcaaggtcctgaaaaccgccagtactgcttttgtcatcaggaatgactgcctgatccgtccaagccccgttaactgcccggtacagatcatcttggtagcgcacttcactagtcattaaaaagcccctttcaatatgaacagatatgtcataatcttaacgcacttctcatttgcgtgcacggttgaatcgcttttcagccatattccttttagttgagaacaatgaagaactgattaagtcaattgttcacaatcgaaatcgctttctttttaatgattaacccgctaaaatggagcatgaagtcaaatcgatggctagtcgtcaatggcagtcatcattcaggaggattgaaaatgtattatgtcattatgaagtctcatgatattcgtgagaatctggcaacagaacaatatctcatgaactcgaaacaatttgatgaaccgttactgctgttctactatgaaaagccgagtgtgattgtgggccgaaaccagaatacgcttgaagagttgaatcaaaaatacgtggaggatcataacattgttgtgacgcggcggttatccggtggcggcgcagtttatcatgatctcaataacttgtgcttctcgtttgtggttgacagtgactctgaagaatttggtgacttcaagtccttcacacagccgattgttgatgcaattcatactttaggggcgactagcgctgaagtttctggccgtaatgacatgctggtcgacggtaaaaagttctctggcagtgctatgtatacacgtaacggcaagacgttctcccatggtactttgatgctggatgttgacatgagtgtgattcctaacgtcttgaacgtcccagaagacaagatcaagagtaagggcattaaatctgttaagagccgtgtgacgaacttgcggccttatctagataaaaagtatcaaaacctcactgttcctgaattccgcgatattcttttgactcggttgttcggcgttgatgacatcgctgaaatcaaagacaaagagtatcacgtcaccccagaagacgaagtcgaaattaaaaagatttacgatgatgtttacaacaactgggattgggtatatggccatagcccggaattcaccaccaagaagcggaagcattttgactatgggacgattgatgctcgtttcgatgtcaaggaaggcaaaattgctaacgtcaaattctatggtgatttctttggtcctaaggatattgcggatgttgccggtgcgttaaaaggcaagccttacacgtcagcagccattaaagacactttagatgccatcaacacgaatgagtacttcaccaatattcctaaggacgatgtggttaacctgctcgtaccataatcgcatcagtttttagaacttaaggcagcacggccaaatgctgtgccgccttttttcatgcaaaaaggacaacctttaacaggctgtccttcgatcgatcagcgattgatcgctcaattatatttaatttgactaatggcgtacgcctgaatccttttcgctccccgacctgttgccacggtgatcacgccgcgttcattataaggtttgacagtcgcggcctcaatatcgaccacgcgtcccttgagccgatggcgatcaatcgtattgatcgcgacctcatgctgcgtgtgcaatgcatcttgaagcaagttggtaatttcttccgggcgttgtgccataagcaattcctccttcatctaagagcagacgagcgaaaaacctgtccgcagatgtctcaatgcgcatcgctgctagccgcggtgaacatcagtcagcgacgatgcagtgactgaaatcggttacagcttcagtataacggttgtgtcgaaaaatttcagtatccgcgcgtgagatcaacttgatggcttgccaattggccgcttgatatcaaggttttgaggttatcattaaatattttaaaaactttgtcgcgtaattgcggcaccgtgcccgaaatatgcggcgtgagcaaaacgttcgtcatgccccataatggtgagtcttgcggcagtggttccggatccaccacatccaaggcagcagcactgatttgcttgtttttcaatgcctgcgtcaaagcagccatatcaactgacggaccacggccaatgttaatgaaaagcggttgtttgctagcggctgcaaagaatgcttcatcataaaagtgttttgtatctggcgttaatggtaacgcgttgatgacgacatctgctcgccctgctgcctcatgggtcgccacatccgtcatcacttggtcaaatcctgcagctggacggccatgtgcactcacgccaatcgtatgcaagcccaatgcctggagtttggtcgcaatcgttgatccaatatgaccggtgccaaaaatgactgctgttttgcccttaagcaatgtcattggcggtcgctcttgacgtaatgtccacatgtcgcgatctgctcgaatggctggcaaaatacagcgactgatcgtaaacaagacgccaagcacatactccgcaatgggttcggcgtgaatgccgcttgtattagccagcaagacatggtgtttagccaactcagccaatggtaaataatcaacgccagcggacatcgcctgcacaaactgaagtcggtcaaagttcacgcgcgtagccgcagcattccaaccataaaccacgtcaatttgttgagccgtggcatcatcaagcttgtcagcatcgatgacgctgtgtcccgctgcttcaagtgtttggcgctgctccggcttcagactaaagctgtttagaatcttcatcatgtcgcactccttttcaaaaaacgcgtacgtaggcgcaaaaacctgcgtgtaaggaccttggctccaatggccaaagttcggccatcacagccaaggccgctcacttacactccggtttctaaccgcccctggtcacgctctatcatggtgccagttaggtttgccccaatattggaaaagatcggttcggatagtcccattatacagcttgcggcgcttggttgccttgctgccataagccttttcaaagcccatgtcacttgtcaaaatgtacttgctccaagtggttaaaggcgcaaatgcttggcccatttctgcgtataattgtcgaaccatggcctgatcgttgagccgtttcccataaggtggattggcaacaatgaccccgttttctttgctcgtcgaaaaatctttaaccgccaattgtttaaactgaatgctatgcagcaagcctgcttgttgcgcattcaacttggccatatcaatcatgtcaccgttaatatcgcttgcctgaatatctaattcacgatcaaagtcagcttgatccatcgcttcatctttgacggtttgtaagactggctggtcaaaaaagccaaagttctcaaaagtaaattggcgttgcagacccggtgcaatgttatggccaatcaaagcggcttcaatcgcaattgtgccggaaccagtggttggatcgacaaacggcatatccggatgccagtttgtcaacatgattaacgcggccgcaaagttttccttcaacggcgcctcacctttggcaattcgatacccgcgtttaaacagacttgatccagtcgtatcaagcgtcaatgttgcaatatcttttaaaatcgaaacttccagcgggtaagtcgcgccagtttccggtaaccgcgtcgtgcgatgataaaccgcagacattttttcaacaattgcttttttggtgatggcttgaacgtccggttctgaatgtaattgcgaacgaaccgctcggccctcaaccgggaacgctgcgtcaagcggtaggtagtgatcccaaggtaacgccttaacgccttcaaaaagcgcatcgaaagtcagcgccttgaattgaccaacaacgattttaattcgatcggcactacgcaaccaaacattggttagcgcgattgtcttatcatcgccttcaaaataaaccttaccattttctgttcgggtttgaatgccaagggctttcaattctttagttgtcacagattcaagtccggcagccatcgtggcaacaagttgatatctcatatgggttttcctttcattcatgcagcgtttttagtggttagttttagtttacaagtttttgagatggtttgggggaaaatggtacttgaattggtgattagaaagtggtcgtgatgatcacaggaatttttgtgtaaggaatttgaaggtaaaaaattcgtggttcttttaaacgcgcaaaaagccgcagaaattgacgtgtaagggctcttgaagcaagacaatgcccacccccgtgtggaaaagctctgttggctctccgaaacgcgcaaacaaaagcagaaacctgcacgtaaggaccttgaccctaatgaccaacgtaaggtcattagggtcaaggcgacttacattccggtttctaaacgcttttgtttccgctcttaaaaaaacagcccgggtttccccgggctgtgcctgcatgtagatccctataagccatgttttgttccagaacttgttcaggcacaagctccttcagtcatcatctatctcagcgttaccgctgtattgccgtcgcttcaatttgcttggcaaaacgcccctaccaaaagtttgggttactcgctcgcggggtttacccgttccaccgctcaggtttccctgatcgtttcgtcactgtggcacttttcagacctactagcgcatagctgacgccttagcgcgtttggccgccgtagccgtttacacggcccctaagcttattgggcttagcacgaacactacaagcatctcagcttgtgcgggcatggactttcctcagcctgcaaaagcagaccgcgatcactcaggacctacatgtgatcattaatattggtcaacgtcggaatggttgccgtcatcatgattgtcaacactgctatcagatagctttgagccgaacacatgacgttccagattactcagacgtttaagaatatcataatttgtcgcagccgcattggtttgcggcgtctgcgcactgacattcttggaaacactcagctgtttggtcagctcgtcgacccggctaaacagcttggtattttcttccttcagtcgatcaatctcattggtgaaagcttcgtaatcgcggatgataccatccaagaattcgtcaacttcatcaggatcataaccgcggaccttgtttttgaacttcttgtccaaaatatccttaggcccgtactggatgctaaactttgtctctttgttactatccattccgacacacctcattgttttcatggaaccaaactactaattagcttaccatatctcaatcattttgaaaatgctcattttcagcttctgccattgcttgcgctgtttcttctaaatcatccatggtaatgagctgaactggataatcacgacggtcagccatcgcctctgctgcttggtaatcccatttagctttacctggaaattctggatcataaaccagcagcgctgcatctgtatggatggtcatgaaccgggtatagccctgcaactgcgctggttgttgatacggtgcttgcgaaaccgcatcagaaaagtccacttgtccacgtagggccgccagttgaccttggttatcttcattccactgcttgccaaaatctgtgaatggaaccatcatcgcaattttaaaatctggatacaatggtttgagtcctaaagcaacctcgactgcccactgctccacgcctaattgcccgccagtaattaaccattccaagccttcatcaagaaactgcatgagcgtattttttaatgaagttttaagtaccttaagttttgggtcattactgccaaaaacgttgagctcataggcacggtaccccgtgacccataatcgttttccaaccatgacttacctccgattattaggccaaagcggctgatattggtataatagcgcaaggagtgtgatcgcatgaccattcattaccctaatggtaatccatacaaagacgggacgcaattttcatcacaagctatttcgcgtccaactatctatggtggacgcggtatgacgttggaagaagaattgaacatcagtaatcaatattaccgcagtattgataaagcggtcgtctacaagaaaccgaccccagttcagattgtgaaagttgactaccctaagcgaagtcaggctgtgattcgcgaggcctattttaaaacgccgtcaacaacagattataatggtgtttatcgtggattttaccttgactttgaagccaaggaaactaaaaataaagcgagcttcccgctaaaaaactttcatcagcatcagattgagcattttcggcgctgtttgaaacaaagcgggatctgttttgtggtcattcggtttgcaaccctgaaacgtctctttgttttccctgccggtcgactgattgactgttgggaccgacaaccagacggcggtcgcaaatcgattccattgaaggatattgtcacaaacggattcgagcttcatccacaactacagccggtcatcccctttcttgatggggttgactggttgattgaaacgaaagtaggtaatgtgcgtggctgataatcaaaatatgtcgcgaatggcccgacgccgcgaagataagttcacgaaaggatctgcccctaaaccgccaaaacgattatggcggcgaattcttaagtggacgttgctcgcgatcctggcatttttcattctcggcgttggcctgttttcctggtacgctaaagacgcgccagaagtgactcaggcaaaattagagtcaggcggttccagtaccatttatgatcgatctggcaatgaaattacgacacttggtttggaaagtcgggattatgtgaaggcctcggaaatcccgcaacaattaaaagatgccgtcgtctccattgaggaccggcgcttttatgatgagaaattaggggttgatcctgtccgaatcatcggggcagcgtttaataatataacaggcactagcgatggtttacagggcggctcgactttaacgcaacaactgatcaaattgtcggttttcagtaccaaatcctccgaccaaacccttcggcgtaaagcacaagaagcttggttggccatgcaggtccaacaaaaatatagcaaggatcagattttagagtattacattaacaaagttttcatgaactatggtcaatatggcatgagcacgggtgctaagttttactttaacaagtcactgaaggatttaacgcttgcgcagactgcgtttattgcaggcctgccgcaaagcccagccggttatgatccctatgaatatccgcaaaaagcaactcaacggcgcaatgccgtcattgatgccatgttgcgtgataaaaagatcaccgcgacggcggctaaacaagccaaagcaacaccaatcactgatggcttaaagccaaaacagcagcaaactaataccgcaaccaatgacaaagtgattgattcttacctcactcaagtgattgccgaagttaagaaaaagaccggccttaatccatataccgacaacttggatatttatactaatatcgatatgggcgcccagcgtcggctttatgacattgttaacactgacgaatacgttaacttccctgatgatgccttccagaccggtgtcacgatgaccgatccaaacaatggtcaggttctcgcacaaatcggcggtcgaaaaactggcgacgtccgattggcctataatcgtgctgcacaaaatacacgtagcaatgggtctaccatgaaaccgttgatggattatggaccagcaatcgaatatctgaattactccacttacgagcagatgaccgatgaaccgtacacgtatccgggcacgagcatttcactttatgattgggacaagaagtaccaaggacgcatctctatgcggacagcacttgaacaatcacgaaatattccagcggtcaagacccttagtactgttggcatggcgaatgcggttaaattcctcagtggtttagggatcaatttgccaagttcggaacaatatctctcaagtgcgatcggtgcttctgtcaataccgttcaagaagctggtgcttatggcgcctttgccaacggcggcacgtactataaaccgtactatgttagcaaagttgtcaccgctgatggcaatacccaaaccttcaatagtcaaggcagccgggctatgaagtccagtaccgcctatatgattactgacatgttaaaaggcgttctgaccaaaggaaccgggacctcggcggctatttctggactgtatcaagctggtaaaactgggacgactgactatagtgatgccgaactccaacaaaaccccgcattgaacgcaactggcattgccaaagatgcctggttcacaggttatacacgtagccgagtcatttcggtttggaccggttatgataaaccgacttcacacgggattaactatgctgaacagaccatttcacaagaaatatacaaagcactaatgacttatacgtcacagagtctgaccaatcgtgattggaccaagcctgatacagttgagtcttataatattctcaagggaagtaatccaggaacggccattaccggcggatctggtgatacgactaaagaactctacgtccgcggacacggcccaagcagccgcaaagcggcagtcgagtcctcttcctcgagctcaagcagttctgttagttcctcttcacgagaaagtattgaaagctcaagttcagtttccagctctgagccggtagtatcagcctctgcctcctctcaaccttcaaatcaagaaccaagtgccagttcaagcgaaccaagcacgccttcgggttctggtagcggcagcggtggtagtaacaacccctgataacgactaagctgcttcagtaaaccctaaaaaatagcctcatccgcttcttgcacctgcctaacgacggcaatgcaagaagcggatgaggcttatttttacggaaattattgttggctgaggcgcacaacatccaaatgatgctgctttagcaaggcttcgccgtatggatcgttacgataatcttgcgcataaaccacgcgcttgataccggcctgaatcaaggctttggtgcaattaagacagggaaaaaaatttacgtaaacagttgcaccatgggtactgacaccgttagccgcacactggataatcgcgttcatttcggcatgaattgtgcgaatgcaatggccgtctcgcatcaaatggccagcctcatcacagtgcggatcgccactaatggcaccattatagccagtcgcaatgatccgatgttcttgcaccagaacagccccaactgtggctcgctcacaggttgatcgttccgagaccttctccgctaactccaaaaaatactgatcccaactttcccgatgaacggttcgtttggatggcacaatgctatctgtcatgatttgccccctaaaggtaaataatgtgtttctaaaaacgcccattgcgtccctgctggcacttgcggatcacgggcgcgcaaatactcccggccaaaacgaattaggctgcgatgaagtttaatccattctgacgggggcatcaaggcttccagtcgcgcctgaacctgaaccggtgtcgcattttgcgggacgagtcccaacccctttacaattcgactaacatgcgtatccacagccacacctggaatgttgaatgcatcacttaaaacaacggtggctgttttcttgccaacgcctggcaaacggaccaagtcagccgctttgttgggaaccttacctgcatattccttaaccaaaatatcactcaaagctttcaaatgcgcagctttagtacgataaaggcctagccggctaatgatcgcagcgatcgcctcaaccggcgctgcagccatgtcagcaggcgtcggataagccgcaaaaagctttggcgtgaccgcattgacggccacatcggtcgtttgcgccgataacatgacggctacaagaatctgaaatggatcctcggcgtgcaaggttggttgcggatcaggataaagtgccatgatctgatcaaatagttgtttggcttcagcatcggtcacaaatggtgcctcctcttgggctaatgatgggtgaattttcatataaggttttcctggcgcttgtcattgcggctttgtcacagctcctgatgacgtctaatatctgcctgaacctgctgtggcgttttaagattgcggcgttcccagttcaacaaaatgcgatccatatattttagcgaataagccgagttcaatacggcctctcgtaaagctagtaaaatgacttccggtagataatgatcagttgtaagccaatcacgaatcgtctcttgctcaattggcgatagtggtcgtccgaattcaatctcaatttggttgaatacattggtttgcgcatcaacatttgcttgcgaagttgccggggttggtgtgccaccagctgaggttggcagtttagccaatattggactgagatcataatgatcacgcatccgaccatgaccatccgggacactttccaaagcaatggcttgtttttgaataagcgtctcaatggcactataaatcgcatttggggcaacgttcattcgggcagctaacactttcaaatccggtgcctgatgatggcttgcctgccactgatcaatgaacaaataagtcatgaactcggtttgggttaaccccaaggtggcgtagtgatcaaacagcaggttcgacagactgaactgccctgcctcaagataagttttgaaatccgtcatggtgcttgccctccaaaaaaagccggcgcacaggcgtccgacttttgattgtcatcatggtttcaaacggttgatcatccgtgggaatggaatcgcctcacgtaaatgatccagcttgcagacccacgtaattgcccgttcaagtccaagaccgaagcctgaatgtggcacgctcccatacttgcgcagatcgagataccattcgtattcgtctaaatcaagtccagcatgttcgatagcattcttcagtgtgtcatagtcggtttcacgttcagacccaccgataatttccccatagccttcgggtgccagcatgtcggcacaaacatattgctgatcatcttccggatctgtcagcatataaaacggtttgatcgtcttcggatagttcaaaacaaacaccggttgatcaaattgatcagacaggtaggtttcttccggtgaaccgaaatcgtcaccatacttgacgtccataccggcatcttgcaacattttaatggcctgcttatatgtgatccgcggatatggcaatttggtgtattgcttgagtacttctgggtcgcgatcaagcaagtgcagcggataggcgcaattatccaaaacggactgcacgagataggcaacgtagcgttcttggaccttcaaactctcttcttggtgacagaatgccatttccggttcaatcatccaaaattcggttaaatggcgccgagtcttacttttttcagctcggaaaactggaccacaggtgaagactttgccataagccattgcccctgcttcagcataaagctgacctgattgactcaagtaagcttttttgtcaaaataatcggtttcgaaaagttcggtcgtaccttctggtgcggaatcggtcaaaatcggcggatccattttgataaacccttcgttattgaagaactcgaacgttgctcggatcatttcattgcgaatttgttgaatcgcaaattggcgcttagaacgcaaccatagatggcgatgatcaagcagaaattcgatgccgtgctccttcggggagattggatagtcgtgcgaatcaccaaccagttcgatgttacgaacctcgatttcatagccaaagtggctgcggctgtcttgatgaatcacacccgtaatccacatactggactcttggcgcagttctttagctaagctgaaaacctcttctgggacatcagcttttgaaacaactccttgaaaataagctgaaccgtcacgtaactgtaaaaaggtaattttccctgagctgcgtttgtcggtcaaccaagccccaattttaacttcttcgttcacatgttctttggcatcaatgatgcgaatctgttccgtcatgcgttaactccctatttctaatttaaataattacttgcccacaaattctcgaatacgtcgtgcggcctcgcgtaagctgtctagatccttgcaataactgatacgcgcatggtcaggcataccaaatgcgcggcctggcacgattgcaacgccggtttccgcaagcaacgcactgataaagtcatcgacggtaccataatgactcaactgtgccgctcgcttgatgttcgggaataaatagaaggcgccttgtggtttatctcccatgtcaaaccccggaatttcggctaataaatcataaaaaaggttgagccgttcctcaaatgcttgccgcatggtttcgacaatctgctgatcgcccgtcaatgcggccactgcagcatattcagacacagctgctggatttgaggtggtgtggctgataaaggtcgccatcgcctgcatgagtttttctggtccggcagcataaccaatccgccacccagtcattgcatacgatttggaaacaccagagatcaaaacggtgttggccacaatgtcagggttgatgctgatcattgccgtgaaggttgtgccgttgtaaattaaatcgcggtaaatatcgtcggtaatgaccaagatatgatgttgcagtgcccagttaccaatcaatgtcagttccgttcgcgtgtatacaaccccgcttggattttgcggtgagttgataattaaggcacgcgttttgtccgtccgcgccgcctcaagatcatcaacactgactttgtggccttccgatggcatgaccaaatgcggcgtcccgctagcaagtttgatttgttcctcgtaagaaacccagtatggtaccgggatcaaaacttcatcgcctgggtttaagtaaacttggaacaaagcatataacgcaaactttgccccagtcgtcgccacaatctggctagctggataacgcacaccgtcttgcgagaaaatgcggtcgctaatggcctgcttcaattctgggatcccagtcgcggcagtatagaaactagcattcccggcttggatggccgcaatggccgcttcatcaatcgttttcggcgtctgaaaatcaggttgaccaatggacagatcaatgacatcggctccttttgccttcaaagccttagtttgattgctcaatgcaagcgtcgctgatggtgcgacgttgaggattctttttgctaaatgcacgactgcgcctcctacagttccggcagttgtttgcgctgccgaatcatactttatttataagtttttgatcgcgttcagctgttcgccactgcgaaaactgtacgtcacgtagtttagtttaccagactttgacagatagccaatatcccaaacgaattctgacccacgttttcctaatgaagcattcaagattttctttggcgaagcactttgattaatttgctgcaacgcttgctgccgagtgatgccagatttctggtttaaaatattgactttgcccgttttttcttgaatcacaacgtacacggcttgatttttcttggtattacccgcaacagtcagataacttttgtcgcggttataccaccaaaaaccgttaatcgttttcagatttgcgcggtttgtcgcgattttctcagcttgcccacgtagttgttgataaggtgagaggcttttcgcgtagacgccaatggcaccaataattaaaacaatcaatccagtaatcacaaagaacttaacccagtcaaatcgacgatgacgcatggggtgcctcctttcgaagtatggtcagatgatttttgatagctgacgagatacgtggggtaattaaaatttctaaaaaagcacttgctggcacaaaagcctgcatatcaggctttgaaagtaatgaccaaagttttctcggccatcgagctctggcgcttacggatggcctgctcgcaacttttggctaaaacgcgttcgccagtccagaaacctgcacgtaaggacctcaagcctaaatggccaaagcccagccatttaggcttgaggccacttatgctccggtttctaaccggactggctcacactctgtctgaaacgcgttcgcaggcgcagaaacctgcacataaggaccttgaacttaaatggccaaaacctggccatttaagttcaaggccgcttatgctccggcttctaaacgcgcctgctcacgctctgtctagccacatcttaatgtaccccggcatgtcagttagtggcaacgtcattggcttaatatttggtaaggatttctgcatttttcgaccgtagcgtgtggtgatgaatcgggggtcgaggacaacgaagataccacgatcggtttcggttcggatcaggcgcccaaaactctggcgtaatcgcaaggttgcgcgtggcaaagcatcctcagtaaatggatcgcggcctgctgcctgaagtcgttcgtatcgagctttggtgatagcggcttcgggcgcatcgaacggcaaccgggtcaagatcaccatttcgagcaaccgatccggataatcaatcccctcaaagaagcttgcggcaccgagcaataaactttgatcaccgaccgcaaaacgcttggcgatcttttccgccgaaccagtcaccccctgagccaataactctttatgatcggcaatcggtcgatgagcaaggcgttggtaaaccgcggcaatggtcgccagtgaattgaacaatacaatcgtttggtgtcggttatcagccaacaactcaatcgccgcggcaagataatcggcataggcttctgcactcaccgcaccagccgcaggagcgtccgtggcgacaagtacttttgcctgatcacgataatgaaaaggactgcgtaactttagaaaagctgtctctggtaagtcatggtaaccaagctgagcggttaaaaagtcaaacgaacggtcagtggttaaagtcgccccgacaaacaccggtgccgcaaaccgctgtagcaactgctgaatggctgatccaacctgaaaaatgtcccaacttaggccaagactgctaacatcatgcatttgccgcaacgtcaaagaagctacggcagtttggccggcaaccagttctggcaagcgcgctaacagtaatttcaagcggtcacgttgatcgatcagggtgactgtcaacgcggctaaggcttgaaatcgttgaccgtcacttttcaaaaagaaatgttgccggccattgaaatctgcatctagtttagtcgcaatgacctgaatgcgaccaatgactttgatcaatgtcttaatattgtctgtttgggacgtgactaaccaattaatagcagcttgatccaagctcagactcacaaacccttgatcagccgttgtcttgccgttaaagaaatgccgatatatttggtgctgcaggatttcaattgtttcttgggccgttgttgttagagcgttaagttgcgccaacacaggcagcatctgccgatcattttgatagacgttaaccaatgagcgatcttcatcgggatcactcaatcgccacaaatgtcgcaactgccgccgaatctgcgctaagtcgatccgttgcgcaaaggcagcggcggtattatcagcaaaatgttgcgcttcgtcaacgaccagaaatggcgcctcaaggtccaacaaatcagcgtggcgtgacagaaaagcgtgattcgtaaccacgatagccgcccgatcaatggaagcacgcagccgccgataaaaatcaagtgtgtaatacgggttgataaatggtgtgcctgaatcaccagtatgccgaatttgcatgaacaatggtgcccgataagttgttaagtgcaactcatcgaggtcgcctgtggttgtttgtgtcaaccaaaccagcaatttcatttgcaatagctgcgtttgccgacttggtgattcttgatgcaaactagccgcgaacttgttgagatcaatataatgttgcggacttttaacctcgactgctggcaagtctctgcctaaaacagcggctaaagtcggaatggccgtctgaattagttggctttgcaaaacaagcgttgatgtcgcaaccactaacttatgttcggcggttgctacataagcataaggcagcaaatatccaagcgttttgccaagaccggttcctgcctcaatgaaaagtggctggggaccaccctcttgtgcatgtgcaaaaaccgcatccatcatccgcgcctgggccttgcggaagcgatagcgcggttggagcaagtgccgtttttcaagatccgttgccggataagctgctgacgcaaacgtctcctgagttgctgtcggcactcggcgcaagaccaacgggccaacttgaacaaacccgcgttttaacggtttcaacggtttagcaattgccttcaaataattgccggtttcccgcaacaagccactgccgcgcgcaaccaacgcctgttgcgtcggactgggcaaggcctgaaagcgagccgccagctggcgcaacaacttagctgtgctaatcgcgtcactatcggcttgatgcgggttatcgtgctcaatttgtaagtaacttgttaaatcaggcaagcgaaaactgctaatctcaggcaataaaatttgcgccaattcaaccgtgtcgatcgcagctaattgcagctttggcagccccactcgctcaaattccgcatttaaaaaaggataatcgaaattaacgttgtgcgctacaaaaaccgtatcagtcaacagctgatgcaacgttttggcgatttcttcaaaataaggggccgcgactaatcgattgggatccaagccggttagtcgctgaattgccactggtaccgaccgatccggattcaccaactgagaaattgtctggataattttgccgtgctgcattaaggcacatccaaactggatcatccggtcgccgtctttgacgctggtcccagttgtttctaaatcgaccacagcaaaaatggtctcagcattcattttaaacattcccgtctaaacatactgttcatatcatactatttaccagcacctgatgctaccagatcgacaacggttccggtgcgcaaaaagaccagatagcgatgcagcaccggtttgggttgtaaatcctgcaaagcttgtgcatataagtttaactgtccacgataacgatccactaaaacggccgtgttcgggttatgatcagttttgtagtcaaacagcgtgacgccttgttcatcactcacgtatccatcaataatcccgtgaatcaagacgtcctcgcctgggtcatcggccaatgcttcaaaaacttggtcagcaggcagcagcatggaaaacggaacttcacgatgaacctgctgcggcttagccaataacaaccgacctaaatcagtttcaaagaagcgaataagtgccgtcaaatcaatgtgctttgccacatcgaccgcaatgacctgcgtggtggtcaattgatcgcgcaaagccctcaagctggccatggtgatcggcttggcgagatccactagctgcagcaatagatgcgttgccgtcccaatagctgctgggctgatgccactaggggtttcggtcagaaacgctggcgccgttaaatcccgcatcggtggcttgggaccgaggaaacgatctgcattgaccagatcaatggtatctggatcatcaaatgcgcgtttaatttctgaaacactttgaaaacctgtcgtagttgttgctgcttggaaaggataggcctttttaaaccacgcagataagtcgaccattgttcctgaatcgtcagaaactttttccggagttgcagtcggtgtgacttgcggattcacgtcaatttcaattgtaaactccgtttcatcaccgacgagcgcaggtttgatagttgtttcggctaacccacgggcctgtggatgtctgatcaaggccggtccgatccagtcgagatagctcgttgccccactgcggacttgcggcgccaaaacacgcgcttcaccttccgccgccgcagcccatttttcgaccgttttatcggcagacgtcagctgattgccactcatcgttgcgccaaccacgtaaagtcgctgttgcgcacgcgtcagagcaacatacaacaaccgcatctcttcagccaaggtctgattttgccgtgcagctttggcagcttgatactggggtaattcatattcaacgcgagtttcaggatctagccatttaataccgataccttgttttgtcaaaatggcagtgccggtttgatcgcgcatattaaaatgtttgtttgcctgcatcaaaaagacaaccgggaattccaaacccttgcttttgtgaatggtcatcaacttcaccgcatcattatctggatcgacttgggcaggcattgccaaatcttgatcctgcttctgcatcaaagtaataaagtgaataaaggcaaataaccctttgaagccacccgcttcataagtgcgggctcgatcaatcaaggcttggagatttgcctgtcgctgactgccccctggggtgccgccaacatagtcaagaaatccggtatcctgatagatagcccacaacaaagtgaccaagtcattttctcgggccaagtcgcgaaaatggctgagctggttgaagaagtgcgtcagcatgtcatgcgtccgctgagcaagtggcgtttttggttcggcttgtagaaatgctgtcacggcatcataatatggcacctgttttgccgctaaacgaatcagtgccaactgatcagctgacaaaccaacaatcggcgaacgcaacacagccactaacggaatatcttgtttttggttatcaatcacttttaaaagcgccagcataaccatcaattcagtcgttttgaaaaaattcttggtatcggccacaaacaatgggactcctgctgcagcaaactgtgtttgaatcagactgttttgactggtttgacgcgtcagtaatgtgatatcgcgatagtggatgcgccgatactcctgcgcctgacgatcccatagttgcgcatcgggatcgttgattaatcgctgaatttcggccaagactagctgcgtttggccagtcgcaatgtccactggctcgttatcatcagcatctcccggtaactcacttgcatcagaagaatcttcatcagatgttgctttgctatacaacaacactttcactgccggatgcgcatcaccgtaatcaagcgcaccatactttaaagccgctgcgttgtcatagctcaaatcgccaacttccggatccatgatttgactgaaaatcagattggtaaacgccaacacatttttggtcgaacgaaaattctcagctaaaataatccgttctggcgcggcgggatcggtcggtgcatcttgaaatgtttggtatttatgaataaatagttgcggatcggccagtcggaagccgtaaatactctgtttgacatccccgaccatgaatcgatcacctggcgtagtggtgctgacagcggcaagtaaagcctcctgcaacggactaatgtcctgatactcatccaccatcacttcatcgaaactcgcgcgatagttatcggcaattggtgcaccggtttgtggatctttttgttgcaaaatgcgtaaagcattatgcgcaatatcactatagtcttgaacatgccgagcggccttttcagcggtcaacgcgtcttcgaactttaaggccacattagctaatgtggccactaaaggttgagcttcccgcaacaaatcgccaatttgctcagcagctaaggcaaaagttggtgccagtttgttctgccaagttttctttgcagcatcacgtagatcttttgccgcgtttttagtgtccttatctgcgtcatccagtcctttactgatgcgcgaccaagcagcaaattcatgggaaatcaagacactgcggactgtatcgtatgtgggtgcatttgtttctaatagtgtttgcaatggggcaagatcagcctgaatttgctgataccaaattgggtttggcagttgattggctaacgctgacgcctgagtcaaactggtggctatttgcagcaattggcctttaactcgcggccagatttgttggctaaaggtcgcttcccatttttccggtgcatacggcgttgccaatccttccaaataggccttgggatcagttgtcgcaccggcttggcggatcaactcaaacatcaagtcttgcaaaccgctatcatctcgatccccgctaaaattagccgtgagttgttcaaacgcaggtgcttcgtcactggcatataattgttcacgcaaatcgtcccaaacgcgctcttgcagcatgtagcgttcagtttcatccgtaagcaaccgaaaaccgggatcaagatcaatgacatagtagtaagtttggacaatttgcaaactaaaggcatccagcgtactgattttagccgcattaaccatggcaatttgattggcaagatgacgccgatcctcaccactaagctcatgtcgtcgctcggtgagtgccttcttcaaagccgtctgaatcttggttcgcatttcggctgttgccgcacgagtaaatgtcacgatcaacatccgggtaatgtcggcatgctgtttgagaatcttttgaataattcgctcaaccaacacggtggttttcccgctaccagcagaggcggaaaccagcacgtcatgcccgtcgtgggtaatcgctgcttgttgagaggttgtaaattgggtcatgcttgcgaatcctcctgacgatgatgcggaatttgtgtgggatcagttgtgacgcggccaagcacctctttgcgtttcaactttggcacatgattgtaatgatcaaacccggttgccggatcgaacagcataatactttgataatcgctgttgctgataacggtggattcctgtccatattgaaacggcgccaaagcgatatccccggctaaaatccgactggcagcatcaataatcaatgcctgattgtgcaaaagataggcacttagatcttctggtgtcagaatgtttgactgattataattgaaggcaccgtcttttttaaaaccaagtggcaccatcatgctgcgtccaccggtttctgctgaaatggttttgtctaccgccgccaagtctgccccatctttagctaccaagaaacctagatatttaaaagcttttagtcgatcaatatcgaggtcaagatcggtactgaatttgaacttaggatcttgtaagtgaaaatacagtgctccggctggcacaaatggcggatcagctgggacatttgccattgcttcaacatacgtcaacatctgtaaggcaatgccatagtacgcgtcactgtcatcgaaccgatgttgcgtgctcttgtaatcaacaaccataaatcgctgcgcatctgattctcgatagacatctagtcggtcaattttgccgcgtacattaacgcgaccaccatgcggcagcggccaagacaagccaggtaagcccctggtatccccaattcggccaaactgcaactcagtgcgcatcggacggaacccggtccggcgttgctgctggcgcatgttcgtcagcacttgaatcaataaccgacttaagcgactcgtcaaataagccatccgatgggtactgccaagaatttcataacccgggcgcttcgtgatagccgcgactaatggcgggaccgccgccgctacatctgccgcggtgacatcggccaatgtctggccggcgtcgcgcaactgagtcagatattgatccagcaccgcatggaaaagactaccagtatcggctggcgataactcaaattcaggtcgcggctgtaaaagcaaaccatacttcaaaaagtattcaaactgattacgataatacgtctctaatcgcgataccgagacattcatgtcccgaccgtacaattggactgctaatgtcggatcaagacgtccagggtcattttgataggtcaaactgcctgctagcttctgagctaacggtgccagtgtggtttgtttgagactggccaaaacgccttgccaacttcgactcaaaggcaatttctgatgctgagcttcaccagccgcgcgaacaaaatcactgagcatggcccgctgactacccagaactgcttttagagatgtccccaacccagccggtgcccaagtagcaggcgttaattgcagtgcttgggctagttgtctaaagtacggcgaggcttgattttcactgttttcctgcgtgttttgcatggggtaactaagtgtcagtttttcagaagctgccataaatccaagataattgataaaaggatcgcctaaggttgtggtcggaccttgttcaggtaaaaaacggtcatctggaagctgagccgccaacagttgccgctcttcgctatttaagacaccactatcgttaggcacatcaggcatcgcggtgtttgttgcgccaatcacgtaaacgtgttttgccttggccaaacgaaccaaacccgtttcggaaataaccaccgagtccagcgtcgacggaatctgcgtgtaggtggcactagcaaagccggccgccaacagttctcgaaactgatcacgattgaagtcagcttctcctaaaatggtcgcatagtcatttaacaattgggtgaaggtatcccaagcctgctcgttggcttgactgcgacttaaatcaccgtcagcgttagcggtttgtcgccacacattcagctgatcaatcacaccagtcgtttgcagccattgatataagctggccgcggcttcgcgaccagttttggcagtctgccattgacgcagcaattgcggaaccgtgtccgcaaccaaagtcttgattgcattaatctgggcagttttatctgcctcgggatcaagttgcgaatcgtcagcgttaggattgcgctgaaaatagcgccatgggtcggtctgtgtccaccgttttttgccggtaatgccagtgcgaacaagatggttatctgttgtgtctaaagcatcacgaaaagccgcgatatccatattctcaggtagtaacaactcggtatgcaaaaggcgcatgacatcctgatattgataatcgtggtcttgtatggcaaaaagactttcaatgagtacgactagcggatgatccttcattggccgttcgagatcagtaaattgagggatgttgaattcttcaaagatggccggaatcaccgctgcgtatggatccaagcgacgggctaaaatcagaaaatcgcggtaacgtgcaccttgccggacggcttgatagatttgacgggcaaccgtccgtaattcatgatatggatcagtcgccactgccaactcaacttctttgttctgtgctgtctgtgcaggcgcctgtggttgtaaattggtactcgtttgccaccaatcagcaaggtgcttcatgccttcgcttagcggacgcggtttagcaaaacgatctagccggatcggtactttcatcgttttggctttttgataaaggcggtgatacaaccggcctgcaggtaagaataaattaggtgccactggcggcgcagccggatatggcttgtccagcactaaactaacggtcacctcagcagccgtttcaatcattgtttcgaccaatccagtctctgaagctgaaaagacgttgaagtcattgagataaatgaatgtgtggctcaggtcctgattgcgcatcacctgttgcaacccacttagtaggctggcattagtggcataagggccgatttccgcttcataatgatccagaatgatccccagatctcgcaatttagcacggtgccgatcgcctggtgttaaagcggctactgtcgtattcagatcttctgctgtgatacgaccggtcactaattcgcttaattgatccgccagttgtgtcacaaacccagtgttatgcgcttcgccagcataaatcgttaattcttccttgctttcaccgagtatctttgcgaccaacatcgtgttactggcccgatcaagtcgtggctgttgataaagcgcagtgtttttaaggaaataccaggcaagtctggagaaagacagcacctgcactcgattttgcgcatatacaccattgacggatgctgcttgtgcccgcaaccgtttcaacaagtcgacttcggcttcaaatttgatatgattagggactaaataaaaaatttggttttgtgaatcggcttgcagattagcttggaccattgtcgccatcgtgccagcgtggtccgttgttgcgtctcctaaaatgaattgcagccccatgcgctacctacctccttaaacgcgctccccagcgcagcaacctgcatgtaagcaccttggcagcaatggccaaaacccggccatcacggccaaggtcacttacactcgggtttctcaccgggccagctcacgctctgtctaaacgcgttcgctgccgcagaaacctgcacataaggacctcaagcctgaatggccaaaacccagccatttaggcttgaggccgcttatgctccggtttctaagcgcggctgctcacgctctgttacattatgctttagtctagcatatctaagtagtgcctgacgggcgtttgcgctatcattaataaagaatattgacgaggtgtttatatggaaatcgggacgggaaaaagttatgcaaaaattattctgcttggcgaacacgcggtcgtgtatggggaaccggccattgcactgccagtgaagagtgtcggcttgtcagctcgcgtcacgcctcagccggatggcagacaaactgtgacgtcttcttttttcacaggaaatttaaatgctggtcaattgaccaattttgccggtattgccatgcttattcgacgtttattgatcttctttaacgccaagaatcaaggatttcatttaaccatcacgagtgctttgccttccgagcgcggtatgggctcatctgccgcaaccgctgtggcagttgttcgcgctttttacgatgcatttcaaacatcgctatcacacgacacattactgaactgggccgctgtctctgaaaaagctttgcatggcaatccaagcggtcttgatgctgccacggctagcgctgagcggccgcaatggttcgtccgtggtaaggcgccgcgctcgatcatgatgccacgaaacggtgtgttgctaattgccgatactggcgttgccggacaaactaaaattgcagttggagcagtggcagatcgtttaaagcagaatcccaaaatgtaccggccgctcatcaaggatatcggtgacaccgttcgccaggcagcattggcgttggcgcaagatgatattattaccttaggccaactgttcaatcgcgatcaggccgatctgtctgcacttggcgttagcagtcctgaccttgaccgtctcattaacgtggcgattgataacggtgcttatggcgctaaattaacaggctcagggatgggtggttgcatgattgctttagcagccagtgatcaagcggtagcgattaccacggcgcttaaagctgctaatgcggctaaagtgtgggaataccattttgaatcgaaatgaggctattatgacgacttatgcacgcgcgcacacaaatattgcgctgattaaatattggggaaaagccaatcgcaagttgatgctgccagccacaagcagcatttctttaactttaaatgacttttatactgacacagcagtgacatttgatcctagtctaaatgatgatcgcttcatgcttaacggtgaagaacaaaacccggttgcggtcagccgctttttggatcgggttcggcacttaggaaaaattagcacgtacgcccaagtcacttccttgaatcacgtgccgactgctgccgggctggcaagttcagcctctgcttttgctgccttggccactgctgccagccgcgcggcaggtctaaacctttctccgactgaactatcaagattagcgcgccgcggatcaggttcagcaacgcgctctatctttggtggtgccgttatctggcatcgcggccatgacgacgcctcttcattcgctgaaccactcgcgattcaacctagtttgccattacgaatgcttgtggtcacggtatctgctgaaaaaaaggcggtcagttcacgaaaaggcatggccaacacagtggccacaagtccctactatgatgcctgggtggcctcaaatgaaagtttaattgaaccaatgattaccgcgttggctgaagacgacttagcgctgatcggcaaattgacagaattgtccagtatgcgcatgcatgcggcgattatggccgaggaaccgccattcacctactttctgccggaaacattacgggcgtggcaattagtgcaagaacaacgggctttgggtattcccgcgtttgccacgatggatgcaggaccaaatgtcaaaattctgactactgaaccttacgtggacattttattaaccgccttgcgccctgtgttcggtgatcggattttgagcacacgccttggtccggatgccagcatcatcacaaaggagcaatttgatgacacaaagtcagcaatcgcatcgcaaggatgaacatgtttttctagctgaaaaatactttcaatctgttgctcatgcgggtttcgatcaggttcgtcttttgcatcgagctttgccggaaacaaccatggctgcggtggatctaaaacctgatctcccgtttaattggcaatggccgatttatatcaatgccatgaccggcggctcgccacaaaccggcaagttaaacgcccagctaggccagctcgcccaagctttgggggtggcgattgccagcggatcgcaatcggtggcattgcgtgatccgcaactagtcccgacttttgcaacgctgcgtgatcatgatccaaacgggtttattttagctaatgttggcgccggtcatcatgcgactgctgccgaggcggcggtggcaatgttaaaagcgaatgcactggaaattcatctcaatgctgctcaggaagtggtcatgcctgagggcgatcgcgactttatgtggcaggctaacattaagagcatcattgcgactagccaagtccctatcgtcgtaaaagaggtcggtaatggctttattcgtgaagatcttcagtccttacaacagctgggggttcaatttgttgacgttggcggtcgcggcggaacaaactttgccacgatcgaaaatgctcgtcgttcgggccacgattttgcttatttacaagactggggacagacaacggttgaatcattgcttgaagcgcgcggactcggtctaaccatgcttgcaactggcggcgttcgttcaccattagatgttgtgaaggcattgcggctgggcgctcatgcagtcggcatgagtggtatggtgcttcatcacttaattcaaactggctatgaagcgacgctggcctattttcagaactttctgcaccaattgcgccaactttacgcgttattgggcgtcaccaattggcaggagctgcaagaagccccaatcgtgctaagtgctgatttggaacattatcgtcaggctcgtggcttaccgggaatttgaccctaaaacaatccaagtcatgattgacttctggaacttttattcgaagggaataatgttgcaacacaattctcagtcggcaaataaaaacgaacgattttcctaatatcggaaagtcgttcgtttttacctatccatagattagttgctgagattttaaagaccgtagtgccaaggcggagcaatcgtaggccagatgaggctcagccgtgcaaacaacacagcgaccggttttcggagctgatgttgttaggctacttcgagaccgcgggctttgcgggctcgaagcgccgtctccgctctagctacgcgtcgccaccccatctggccggagattgcgaagtttggcacggcaagggactattagcctagcaccttcctacgactatccggaatttaatgattcacaagtccgatgagcaaataatggctcagcctcgttcaccggatgtgagttatgccccgaaccgagtcttctttactaaatagtggctgttgaactaggccaccatatcttcgacccttgtagtaaatttatagcgaatttgataggcctcaccctcgaatttagccaaaattaaaattggtatagcaaatacccttaacagggtcagcacattgctcaagacgatggccgcgtcaatcttgacggccagtgattcagctgtccgagtgttcaccaagccaagccccagcgtgcccttcataaaagcaaaccggcgttcaatggtacctcttcgattctcggcatcagtatcctcacgccgtttcgctgcatcaacgtgttttggatgccggccaagcttcggaccgcagattcggatacccaaatccttacacagctttaggttctcccgattacggtacagcgtatcggccagtacttcatccggataatgtccatgaaggtcgtaatagtggtctaaagtttccgcgaagtcttggccctcagagaatgcggtgaaatcaaaacgttcaatgtcgactacgccttcacttaacgaacagtcaatcttcgccccaaattcaactttagcattggccttaccacgttgaattgggcgaatgtacggctgttggagactaacaattcggtcttcaacgtggtgagtcttgtgggtatacatgtaccattgctggtcaaatagaattcgaatcacgcctaagcgaatcgcttgttcatctggtagagtcgcaccctgatcgatgaattcgttgatgtaccgcaaatcacggcgcacatattgaagttgggccttgacctgtttatgaaagccaccacgctgttgctttggatgtcgtgaaaatgaggtccaacaatgcttcgcctcgcgtttgtacatgcgtgggtttggcacaccaagttggtgtgccatatcgatcgccatcgcctcaagattcagccttgcttggttgaggaggacggtgtcttgaggatacttgattttgactggcactgcggttgcgtccgtgatgacggtgtccactttgaatgggaccaacgcttcgatcttggcgcgtactgtatcattcatgatattcgtaatcagctcggagatatcggcaattcgtttgcgaaagtgtgccaggctggaataattgaacggctcaaccgctttgtattcggacaacccgatgaaatattgaagtgcgggtgtatcacgaattgccgcaaccaccccacgatcagttaaacccatccgttgttggatcaggattgccccatagagtaaacgaaatggttttgccgcacgtcccgcatttttggtgaactccaattggtatgcctcatcgagagctttccagggcatgacctccgccaactggacccactcattgttagagctaagtggggtacttaaaccggcaccaaaggattcaaatgacaattgaagcgggctgtgacgatagaccatacgataacctccgagtagcttcccaaaaaatgcaaggaaaatgcaggaaaacagctaattccaatggatttattataccgcaataatgcatatattagcttaactgcctgaattatagaatttttaagcagccactaaatatcaaacacgcaacccttttggataataatttttgatggtaccattcaccaatttaccaattgcaaatggcttatgctcgaatgtcagcagaacaaaacgtttgccacttaccttgcttggcaacgtttcaccgtgccgataacgtgcataaccgtccgcatgaacctcaatcacagtttgaaaatcatccggattaagagcagctgctaaactatgacttggttcaaatcgtttcttccggaaacttccgagttccagaccggcacgcaccactttcacgtgctcaaacgggatcatcgttgttggtaaaattgaaagaaaatcgccatgccgataaaataggccgctgggctgcttggttaggcttgccgctacaaacgcatcaacttcatccttcgccggcttggctagcggtttaagcggcaaacgggctggttgatgtgatgctggtgcccctgctaacttcagcttagcaacaaaatgcccttcgccacgcaatcggtgaggaaacagtcggactgttttggccagttccggattgccatcggcccacgctggccgcccagcttccatccccggatattgcttaatcggcgtaagcgtgaacgcgttattggccaatagccaggcaatgatttgctcatcttcttcaggactaaaggtgcaagtcgagtaaatcaacgtgccgcctggtgctagcatcttcacagccgctttgagaatctgcttttgccgctcagcacattgcgcaggatagtccgcatgccaatactggattgcatccggatctttacgaaacatgccttctcctgaacaaggtgcatcaaccaaaattcgatcaaacatttgtggccacgcttttgccaacgtgtcaggatcattattcgttactaaaatctgccgagtaccccaccgttccagattgcctgacaaaacttttgaccgcggaccattgatctcattgctgaccaaaagcccagtgtcgcctaaatagcaagcaagttgggtcgatttaccgcctggcgctgcacacaaatctaatacccgttcacccggctttggggctgcaacagtaccgacaaactgcgcacttggctcctgactataaacaagtccggcaacgtgatcaatgtcgttgccggcgaccttgccataataaccccacggactccaaggaattggttcagttaatgactcgtccaatggccacggcttggctggatcacgccgaaagccactttccgcaggtgcttcaaatgtcgctaaaaaagcagctgcttcatcgcccagcaaacgagtatatttttccttaaatgcttcaggtagttgcactagctttatcctttctgtgaatcaagtaacggaggaagaaaatggcagcgatggtcaaaacgacaagaaagacccaaatattagttcgcgtggtgaagtagaaccaccagtttgcaaaaaggccaccaagaaaaagactgacgccaatatgaccaccacagctagataaaacgccgcgcaagtaacgcgcccgcatattcaaatccaaaccagctgtttgcaacggccccattaagaccaccatgagcatcgtcagcaatcctgcacccaacaataagaataagctgaacaatgccgtttgaccataagcatgccaccaagtcgaagcattactatcgctaaagtggacccgatgaatattttttgctttgaaagcggtttttaaggccttgctatgctgactggcgccgtcaacatagattttgacctgctttagtttcagcttactattggtagtttgtgcagaggcgttgagaaagataactttatttagcgggctgcctttgcgtgtgcccaccgttcccaatactgggacatattgaccattcacttgcaaataacgttgattattactgccagtatacagtttatcggcaagatcgcggccaaccaccgtcaccggcagactggaggcaaaatcgccagccgagaaccactgaccactatcgagtggcaggctcgcaactgtgccacgctgataaacgtacacgacttgtttagcaacaaactggacctgataacctttgaaatcagttttatcgagctcgcttatcgcggtggtgatgctgcgcgaacttgtcgtgacatattcctgagccgtttccgacatgccgaggtgatcaagctgactggcatattcattttgatcatgctgtgaccatactaaaccggctaatatcgctaaaccgatccataaaagatcaatcaagaataattttttcacgtcatcctcctcaagtcctgcacaaataagccatttgccaacagtacagagactattgtaatcggtaaactcgttcgtgaatcgcatcaaaatgaccaaacgcacgattaagcgcgaataatcgccgatccggaacggttcgggcttcttgccaaaataaccggctattggttgcaccgttgcgttcgccgatcacgaataattgtttagtgggaaaatagtgttgcataatatgcaggaaccggacatcattaggatccttatctgggctccaagccatcacaacagcatcaacttgttgggcgtagaggaacaacgccgcgttggctgtggcggttttaactggaacaagcggctgacagccagtgacattttctttcgtccaagtgtgcgcatcggttgtgatcgttttgtcgccttgtgcgcgcaaaccagcactcacgtaaccattaccagctgccacttccaagtaccgctgaggaccataaagtcgatgccaggtcgcaaacagatcttcatgaacaaatgaccacatgccatcatgaaaggcaatgtagcggcggaaattatgcaataaatgatctagttgaagcagttcttgcagctgcgcctgtggctgggttaaagcggcatcaatttgcggcgtgctaagtcccaaccaaggtaacgcatgtgctggcaagacaccagccgcaatagatgcttgccaatccttcatggcagttagttgtgatttaagcggtccaatgcgcgcatattgtttggccagccgatttaatgtgctccaatagtccatgttcaccctcgtgatccatcgctttgactgcctgaaagacagtcaaaagccgccttaaacggcggcttttgcattccgtgtctaaacgccggttaatgaatgcccagcgccattttggcataccgactgaggcgttctggcccccacgctggataccaaactaaatgaatttcaacgctggtaatcccgtcaatcgttgtcagtgcccgtttaatatcagcatccaacatgtctgtcaaaggacagcccatcgttgtcaatgtcatttcaacggtacatttgccgctttcatctaaatcaaccccataaatcaagccgaggttaattaagtcgacaccgagctctgggtcaatgacggtttccaaagcgtcaagaatttgctgtttcattttatcaaaataagcctgatcttgtgaggctgcctgatcgctggtgtctgccatcgttgaacccttcccttctgtgacccggcactgattgctcaaagccacccgttaagccttatctgatgcaagtacaccggcaactgaataatgttccttagccatttcgttaagaacaatgtgaatatgctcagcgggtgcgccagtatctttgacaatggcatctgtcacgtctttcacaagggctttcagttgctccggtgaacggccttcaatcaaatcaatgtgaactaatggcatggtattcgctcctttggcggcaaaagccgagagttaatttgctttattttagcatgagtgtaagattttcgcacctatgctatgtggtttgctctttgtcaattccatttaaaaatcgcatttactggaaaatttttcccaatcacatgaaagtaaacggatcagtcgatagtttagatggtatggctttaacatcccatccttctgcatcggcccattcgttgatcaaagtcgcaactttgcctttcataatcgactcgatatggtggccgggatcaatcacgggcaggtcggcggctagcatatcgtgaccggtatggtaatacacatcgccagtgataaagacatcggcgccagcttgcttggcatcgttgaaggcatcaccgccatcaccgccgagaatagccactttttgaactagccggtctagatcgcgggcaaccacgcgcaaccctttaacgttataggctgctttgacttgttcaacaaaagcatcaaggcgaattttgtctggtaacaagccaattcggcccatgttggcgccttcaccttcattgataaaaggcacaacttgacttaatcccaacgcttctgccagccagtcattcatcccgtcttggacgcgatcaaggttagtatgcgctgcatagaccagcaagtcatcctttagaatttgggcgtacatggcattctgcggaacccgcaaatccaagttatgcactggtcgaaacatcgctggatgatgagaaaagatcatatcagcatgaatcgcctcggcttcagtgaccacttccggccggacatctaatgttacgaggacggttttaactggtttatctgggttacctaattgcagcccgcttggatcgcgttcccatgccaaacttaggggggcaaagtcttcaaatcgattaataatctgtttaccgctcgtcatgtgcgtctaattcctccttgattaatgataaaattttttgttgttcgcgaatcttttctagcggcaccatctgtgcatcagccaaaccttcaagcacagcctcggttttctcagcttcgcggtgcatttttttcataaaagttggactcttttgccgccgtaaaatcggcccgaagcgtaaatcagcttccgaataaggcacatccgggcgcgttcgaccagctgccatcagttcgtaaatatgaccttcatcttcgacaatgtcctcgccgataatgccataaccatgctgatcaagccataaacggacatcgtattggtgtcgattaggagccagtaccaaggtttcggtaccgtctagttgtggctggccagcttcaagaatatccgtcatcagctgaccgcccattccagcaatgacaaccgttgaaatggcatcgtcaggcatgatacttgccaaaccgtcagcttgacggacgctgatctgcgcagttaacccagcatccgcaacgttttgcttggcaattgcgaccggtcccgctccaatatcactggcaatcgcaaaattgatgcgttgctgctgtaccaagtaaatcggcaaaaaagcgtgatctgtgccgatatccgctacccgttcgcctgcctcaataaaactgctaatggcctgaagccgttttgataaatgaatatgatccatgactatactttctcctcatctcgttaacagttttcattataacaaactacgccgaacagttagaacctgtctagtatcttttaagaactatcttcaggaaggccaatacaaccatttgaagactgctgttaagggcacgttcacagtttttccaaagtcgccgacatttgtctagccaactccatgaacgttcaacgatccatcgttgcggtaacaccgtgaacatatgcaactcgttgcgtttagctaccgtcgtcttagcattcaaaatgagcttcacctgatccgcaaagtcattgccagtgtagccaccatcaaccatgacatgctgaaccagctctaaattttggctagccaaactaaacatagccaatgcacctgaacgatctgatacattagctcgtgtcacgagaatggcttgtggtaaaccattaatatcaaccgccatatgacgcttaatccctgaaatctttttgccgccatcgtagccactatttttcgttaaatcagtggttttaacactttgagcatcaacaatcacaaacgacgttcgggccgatcggccctgtgcaaagcgataggaagcaacagtttttttaaaagcctttctaatagcgaatcagctgtcgggtctggtttatctcgccacatatcgtaatagcggtagacagtgtgccattccgggaaatcgtgcggtaattcacgccattgacaccctgtagtaagcgagtaaaggatggcattgaatacgtcataaagatcataacgacgcggtcttgtatgcttgcggaagttttctaaatcaggttgtattaacgcaaattgcgctcgagaaatattgcttggataatctggcatgacaaactcctcagtcggttttccacaattctaccagattcagcagatactagacaggttcttagttaacttttctgaaaagcaggttacgtcctcagaaacatcaaagatttccggtattcgaatctgaatgagggccttcgccacatgatgacgtacgaaaaagccgcctacctcactaatgaggcagacggctttatcagctaacaaacgttcattactcaagaaaatccttaagttgcttggaacggcttgggtggcggagcttccgcaatgccttagcttcgatttgacgaattcgctcgcgggtcacgccaaagaccttgccgacctcttccaaggtacgggtccggccatcatcgagtccaaaacgcaaccgcaaaacattttcttcacgatccgttaaggtatccagcacactttccaactgttctttgagcagttcataggaagcatggtcttcaggactggtggcgtcttggtcttcaatgaagtcgccaagatgtgaatcatcctcttcaccaattggcgtttccaaggaaacaggttcttgcgcaatcttcaggatttcgcgaaccttttcagttggcatgtccatttccgcgccgatttcttcaggcgttggttcacgaccaaggtcttgaagcagttgccgttgaatccgaatcaatttgttaatggtttcaaccatatgcactggaatccgaattgtccgggcttggtcagcgatggcacgggtaatagcctgccgaatccaccaggtggcatacgttgagaacttaaagcctttccggtaatcgaatttctcgaccgccttcatcagccccatgttcccttcctgaatcagatccaggaattgcatgccgcgaccaacataacgcttagcgatggaaacaaccagtcgcaagttagcttcagccaaacgttgcttagcttcttgatcaccttgttcaatcttcaaggcaagggcaacttcttcatcagctgtcagcaaggaaactcggccgatttccttcaggtacatccgcacagggtcattgattttgacccctgaaggtgcggacatgtcactcatttccttcttggaaaccttcttttgcttcttcaagctaatcgctgctggctcgccattttcatcaacaatagcaatcccattatcctcgatcttttgcatcagatcgtcaatggcaccactcttgagctcaaacggcttaaccaacttgtcggtcaggtcatcttcagtaatttgtttcttcttcttgtaatctttaatcacggccttgacagcatcgtcgaatgctttcgttgtcgttttggtcgtgcgtttgctgctagcggtagtcttcttgaccgtagttttcttcgcggtggtcttttttgccgccgccttgacagcggttgtcttagccgcagtttttgctgctggcttagccgttgtcttctttgtggtcttgtctacttcagttgctgtttttttatcagccattaaagttcctcccctagccttgttgttgtttcaaaagtttcatgagattcacatactgcaccgttagctcgcctattttctgcttatcgccaagtcgctgtgcctctgtgatggcctgcttgatggcctgcagccgttcgacagttgaagcggacgtaatcgtctgaatcaactcgtcaatcgttgcctcagtcgcctcaggcaaaacctgcatcgccaccgaagccgccaccccgctcagatccggatcgactcgatccaggaatccagctaactcgccatcaggctgctcatggagaaaatctagccatccggtaaagagcgtctgaaaatgtggcactggaaatgtgaaagcagtattttttaaacgctgcatcactaaatcatcgtgccaaacataatacagtaattgtcgttgggctgcagtgtaacgatcaattggccgaactggttgattaaccggcgcggtttgatagctcacaggagccgacgactgttgttgcacggcttgctgcggcgctggcaggctttgattcagagcgctctcaggtacgccagtcgtgtcagctaactgcttcacataaactgcccgcgctaccggattcgaaatcttaccgatggtttttaaagccgcgttcagatacgtcagtttagcctgatcattgttcatgtcaaccccgcgcgctaagaattgcaggataaacgcggtcggcgtcaatacggatttgacttgcgcttggaaggcttcggcaccacgggcacgaatgaactcatcaggatccatcccgtccggcaaaacgaccacatccgtttgtaatcgcggatgatcagccaacatggcaaccgcacgttcaatcgccttttgccctggttcatcaccatcgtaacacacggttaatcgcttgcttaagtggctaatgatgtcaacctgctcagtagttaagcttgttcccatggaagcaatcccggtttttacaccggcttggtacgcagcgatcacatccatatagccttcaaaaagaatcgggccgccatcacggccaaaatcggctttggcacgatgaagattaaataggacatcacgcttgttgaaaagcttggtttcgggactgttcaagtatttagcttgggtcttgtccttgcttagaatccgcccggaaaaaccaatcacttgaccatgactgtccgttagcggaaacatgacgcgatcgttaaaccgatcgaacaattttccttcttgatcctctacgaacaaaccgctggcacgctgatcttgatagtcgactttgcgattattaagaaacgctactaacagattacgttcttcaggcgcataccccagttgaaaagcttcaattgtgtcatcagttaagccacgtttgtgcaaataatcaagtgcagtctgacctttctccgtattcatcaaaatatgatgaaatagatcggccgtgtcttgcaaaatatgctgttgcttgctgatctctggatcaaccggtgctgcatgacccacctgaacatccagtggcatgccagcaaaatccgccacttttttaactgcctccgggaaggtggcgttatcatagtccatcacgaatttaaaaacattgccgccgcggccgcacgaaaaacagtgaaaaatctgcttaggttcattcacagaaaatgatggggtgtgttcttcgtgaaaaggacacaagccaaacagattctgcccggtcttgcgtaattgcacatattggccaatataatcagcaatattgacagctttaaggactttgtcgacagtagcctcaggaatcattccggcgatgtcagctcactccctttcatgacatgtgccgcagagctgtttgacagcctgcagacgcccaacacacgttacccgaaatagcggtaaaaagtcgcacttctgagttgaaatgcgactttttgatagtctatcggcataataatacaaaatacagtatagcctgtttaggcttggaatgcaaggctacttaacaatgacttgactcacatcgccaaattgcttgatcaatgcggcaagttgaagcaaagctgccaagcgattttggcgaatggcttgatcgtcggccatgaccattgtggcatcaaagtacgcattaattggatctgcgagtgccttaagcgcctgataatcggcttccgtcggttcatcatcaaacttcttggcagtcgccaccgttgcatcatacaactgaccttcgctcggattctcaaacttcgccgtatccacatcgacttttacctgctgcttcttggtaatccgcaacacacgtccaagtgcttccatgacaggtttgaaatcagtatcgtccgcgtgcgcagaaaggatcttggcagcatccaagataccggcaagatcggcatcagcgcgaactgtcactgcatccacaatgtcatggcggatcttctgaccttgcaagacttgtttggcacggtcaatcatgaatgcattcaaatcctgttggtgcgcagcaaaatcaagattattggtttttcctgctgccttcaaggcatcagcaatcgtcgtctgcagttcagcaacggcaaatggccaatcatgtttggcgatcattcgaacaatcccgtaagcttgacggcgcagcgcataaggatcgtttgagccacttggaatcagatcaaccgcgaagaaactcattaacgaatcgaatttgtctgcaatggcaagtacggtgccgactaagctttctggcaacgccccatccgcagaaatcggctcgtaatgctcagcaatagcctgggcaacagctggtttctcacctgccaattgcgcataatgttcgcccataataccttgcaattctggaaactcaccaaccattgaagtgacaaggtcgaatttgtaaatcgaagctgctcggtccagatcagccttatcagtcgcagataagccaaaacgatccgccaacaaatcggcgataacccttgttcgagccattttgtcgtacatggaactgattttatcgtgaaaactaacagctttcaaacgatcaacatcgtcagcaatgctacgcttttgatcttccgcatagaagaaagcagcatcttccaatcgcgcggtcaataccttttcattgcccgcaatcacattggctaaatgatcagcattaccgttacgaacaccaataaacgcattgaccatctttcctgacgcatcccgggcatagaagtaacgttgattatctttcattgaggtgatcagcacagcttcaggaattttgagatacttttcatcaaaattaccagcaaatgcagttggccattcaacaagattattgacctcttccagcaagtctgcatccagatcaatctgccattgatgatcagcggcaatttggtgaatctgatcgctaatcaattgcttgcgcgctgccggttcaacaatcacaaattgtgcttttaaggccgcaacatagtcggccgcattgccgagagtcactggtctgccaaggaagcgatgcccttgagtggttctgccagcgtcaacatccagcaacttcatcgggacaatcgcatcatccagtaagctgaccagccaatgaatcggccgaatgtactcgaagtcataagcgccccacttcattcgggttgggaaggtcaggcttttaatgacatccagcatacctggtaaaatagctgctgctgttttgcccttgattgccttatgcagataaacgtaatccacacctttgatcgttttaaagacaatgtcatcaggggtcatgccttggccgcgagaaaagccgatcgccgccttggtccagttgccatctgcatcttgcgcaattttcttagctgggcctttgacgtcttcttcgacgtcctcttgcttgtcggcgaggtcgtgaatcagcaatgctaggcgccgcggtgttgcatactggtcaatcgcgccatgatcgagatgattttctttcaaaaaagcgacggttttatcgtgaaactgttgcaaactcggcgtcaccacatgcgccggcatgtcctcaagcccgatttcaatcagatattgatgcgtcatgttattccacctccgtttgatgttgcagtaatgggaagccaagcttcttgcgttcagccacaaatgcccgagcaactttgtgagccatcttgcgaatgcggctcatgtaaccggcccgctcagtaaccgagacagctcctcgggcatccaaaagattaaaggtatggctgcatttaagaatgtaatcataagctggatgaaccagaccgagatccatcaaacgccaagcttccttttcataggcgtcgaagaacttcagcagcatctcttgattgctgacttcgaaagcatacttgctgtgttcgtattcaggttccttgaaaatatccccatacaaaacaccgtcgccccattcaagatcaaagacactgttcacatcttgaatataggaggcaagtcgttcgaccccataagtgatttcgctggtaactggcgatacttcaagtccaccgacgacttggaagtaggtaaactgactgacttccatgccgtcaagccaaacttcccaaccaacaccggcacagcccatggatggattttcccagttatcttcaacaaaccgaatatcatgttccaatggattaatgccgagtgcagcaagcgaatccaagtaatattcttgaatattttcaggagatggtttcataacgacttggaattgatgatgctgaaacaaccggttggggttttcgccatatcggccgtcagctggacgtcgagacggttcaacatacgcagcattccatggttctggtccaatggcgcgtaagaaagtgtacggactcattgtccccgcccctttttccacgtcgtaagcttgcatgagcatacagcccttgtcaccccaaaatttttggagggttaggatcatcgtttggatgtccattttttttgtcatcattgcctctttcccggtgaattgaagtgggattggcttcgggacacgaaaaaatccctacgccaattaatggcgtagggacgcttatgcgcggttccaccctacttcagatagaaaaaactacctgcggcttcatcatttggttcgaaaacgccaatcacaacaaccgttatcaggcttacactttccccgactcgcttcaataggtttcgttgcgaccctttttctcatcaccgattcaatttccttattagtatagcatcgcggaaaaacgtgtcaatagattttctgaaagcacctaattgtaagcaattttgccatgttttccctcatgttatctctcatgttttccctgtcgtctgtacccctttttgccagtggagctacagcagttattttttaccggtttttaaataccctgccagcttctctgcggcctccacttcttgttcctgatggacacgggcatagatttgcaaggtgattctggggtcggtatgtccgaccatcttttggaccgtactgacagcgacaccggcaatcaaaagattagagatatagcttttacgaaacttgtgcaacgatataaccggtgccaagttgttgttacgaataatggtactaaaccacatgcgcggtttgtcaacacggaaacggttacctgtcttagtagtgaacagaagttggtgatgagttgaaagcttgacgtagccatatacatagtcaggttgttcaattcgccatcgctttagccaattaatagtttctgaatcaactgggacatcatgcctacttgctctggtttttggcggattaacaatcagcttcccatgcacaccgagtgaaacagttttgttgacactaattagtcgctttttgaaatcaatgtcttcccaattcaaacgccatagcctcgccaattcttaaaccggcataagctaggatacgaaacagcacatacttgtaaagttccctatcagggttaatacaattgaaaaacacttccaattgacgtctatcccagaagtcgtttgtggagccaatcttgtcttggacacgtggtaagatgatgcgtcttgcaggattgtgtgggatatagtccctgagttcagcataggtaagtattcggttgatatgaacaaaggaccgtttaaatgccactggagactgtttaaaccatctattcaccgcagtttggacatcttgtggagtgatcttatcaatgtacatgtcgcctagatcaggcaaaatatggagattgaagcagtcacgagtcttggaccatgcactttccctgactgtgagcttgtatgattttagccattcttcatagacatctttaaactttcgtgcaactttatcagttttaggtgcaaccgtgagttcaccattctgaacagctttctccaaatcagccctgctttaatagcgtcttgtcgtgtgagcttacctccttttacaacatacttcttatgtccagtctttggatcaattccaacataaacggataccttccaccgtctttttccactatcaagtttgtaactcctgattgaagccataattttgtcccttcatcgccagcaggctatgtagagagctaactatttacgctgatccagcattgctttcgctaaagcttttagcaaggccttttcagcaggcataagtggtattccgttcattttaacaagcgttttgtcatcatcaagatcagcagtctgcgtacgttctgctggattgattggagttatgccattgaaagcaattgcaatcttatcagatgcctcttgagtgacatttcgtgttccggcttcatatgaacttattagagacgccgataatccggttacacgtgacaagtctacttgagatattcgccgcgcattccgtagctgcttaatttgttctccagataaaagcattagatcaatctcctttcttataaaattaagaacacagtgtttacgtattcactaaaacaatttatgatgattcatgtaaagattatagcacagtgtagttagcttacacattaaaagaaggtgcaaatttggttgatatctttatttggcttgtgtctcatcagatcacacttgcggctttatgttttgcaactctagcaggaatctttattggtgctctgattcaatttcttgaagacaataaaaaaactaccccgcacgccaatgcgaagtagcaatcaaaacagatacccaaaactgaatatccgcaataatcacccacgccaatgggtcattatactgattgtctagtcaagacaaaataagtatatcatgattgttatgttcgtgtcacagcatacctgctcacggttgaaataaagtcaggtggtcagctggagccgatgctataaagtccagccggtaagaaatcccagtcaggttccctatcgtcaaatccttggtgtctacggccttccggactttaaatggtaaatggtaggggtggaacgtcttgacagctttaacgagctgtgaggtcatccggccatgtgtattagaggtgttttcaggagttagaccgcacagttaacagctaaataaatctcaaactcatgcacatggtactctgggcaggactagagtggtaactggatgctggttattagcaacgtgattatcatgggttaataactaggctgtgtatgcaattggtggtgaagagccacccacagtcacttttttgtggcaagggggaactatcagcaattacctacttccacccatggatgctaccaatgctaacacaaagcgcttaaggtgaaatatatatgaaactattttcaacaatttccaaagctaacataaagtaataaaataagagctagcttagtggaccaacagaagacactagaaagtgggttaacaagatgggattaataaagaatcttgggaaaatggccaggcagtcattagtaagtgacgacactgtacacgcagtaatatctccaattgttcagaagactacagaagctgtagaaaagaccgtggacaacaacgttaaagtccccaatgtattaggaatgcaggcaaaggaagcaaaggatgtattagagtcgcttggcttaaaagtttctattttacagcaacgaacaccaaacaaaaaatatgcacaatatgcacctggagaagttgttgagatggagtatgacacaccaagtttaattttaaaaggtgttcacaaaggtagcttagtcaagatttacaccgctgatgagagcgtacttactaaaagtagatcttggcgttataagttactgagttaatttggctctgcgtcaactggtgttgaagaataaatttatcatttgaggcggttctccatttggggagccgtctttgtcatgttatgccgtgatttggtagattcgtttgaagaagttcagctgattcttgaagccaaaacaggatcgtttgagtgacttgatgaggcggttaaccccttcgatcggaccgttggaataagggctggtgacagcggcgagaacagcgactttgtgtcgcttaagcgtcgcgatcgtcatgtccattgccgtaccgtttggctcgtaagtagctaacaggtttgccagttccgcgggatgtttcttcaccatcaaagcatcatgaagcgctaagtaggtctcgtaggtttgcttgagcttgggctcagtatcaagtgcgatatcgatggcctcctgttgcgtgacgtattcattcaaaccaaacaggaactgtttgtgtttagcgtcaggcgcagtttgatgaaaaagccgccagtttgtcttcatgatcttataaggacggctgtgtttgtcatcaagctgtttgagcgcttggacgcgtacctgatcaagggcacgagccgcaagttgaatgatatggaaccgatcaatgacgacttgggccttggggaaaacctcatgaataatcgtctgataagctgcattcatgtccatggtgaccgtctggacccgagtgcgttcagcgagtgaataatgagcgatgaagaagtttttaatcgtgcggttgaatcggtcaccaagcaaggcaatcagacgatgtgaatcggcatcaagacagataaacgacatcatgccatgagtggaacggaactcatcaaagcagagtcgcgtgggtagccggcgagccggtcggagtttgagattttggtcaatgatccgttgaaccgaggaggctgagattccgataatacgggcgatggttttgactggcaaccgttcatgcgctaacttcatgattcgctctgtcatgtgagcggcgatcgtgtggttgggttgcacgagtggcgtcttggcactgactgtgtggtaacagttatgacagcgccatcgttgcttgtgcaagtcaatgactgtcggtatttcaaccccgttgaggacgcgcacgtgggccgtgtaaaacccgttagggtgcaaggcctcaaagccgcacagtgggcaccgggttaaccggtaagtcagctcggcatcaatcacatgatactggcggcgacgtaccccgttgccgcgatattcatgacgaacaaaggcaactttgatattatggtctggtattccaaggacggacagtgtaggatcgtattgggacatttactcataacctcgcttgcttttggtttcgacgctaacaagcatagcatggacactgagtaggtgtctttttgcgttatccaaaaagggcctacacgttcagtgttgattatttctcaacaccagaaagtgtagacccattgaaaaagtgtctaccaggattatgggtccttcaaaatggaaaagggttacacgtgcttactctattcatcagtttttacaagtgtgtacccatgtttatagcagtttatagcaatttcaaaacggaaataagggttagaagattgaccacgacttttgaacatttgagcattgtgccctttactgtctcctctttaaaacacaaattatgccccgtctattccgttttagatgcatgatgcacaaaatgcatcgatgccaacttgtcttagagagccaatgtaagccttctatgggtatcctatagtgtctggttcaaatcacaatggtgcccacttcccaatcaggtggaacaggtggacaatcttatgatgctcatgtaataccatataacgccttatggacgaatgggtatgattacacacgcccgagatgataaaatagcttagagagccaatatgagtcttctatgggtacagcaatgaattgactaataacaaatggaaatgaataagcacaccatggtcacatgatgcaccccttttaaagctcctttaattctacttagctgctgtgagacacactttagaagcacctgacgtatctttacccaatcaggcacaatcacaccatcacaccaagcaactaggagaacgccttagatggcaaatgagaaacaaataggacgtgtgcagcacttaggtagctggttgttagattagtagcaaggcacaaaaggaagtgttgcctaatggatgaagatactgttttttaaagttttattttttgttttctttgattgttccgacttctacgagtttcacattgtctgatgattccttatcaggttgaagaaacgaagtgaacttacgcttgacttctagtgttttcttgaatatcccagatactttgtatacggacattgaaagctctggataaaacgcatccggatcatccatagcttgcgctagttgcaatccataggggcattctataatgctaccattatcacgatttgtccagactcctgctacatgcagcttttcagacagttccccgctatcattcattttttcttcgtctttcctagatgcaagtatataaagacacccaaaattgtcttgccgcgagccaaatgctatgtagccaatagacatgtgatttgcagttccaactccaccagcagattgaacttcaaatatcttgccagggacaacatatgatggattgtctccagcactttttacccaaagcaaccccataattacagctataccaataatgaataaaaacttgtttctagatttacgctgtggtacctgcctgttacgttctctcattattaagaactcccaaaaagatgcgacctttttactaatctcagtttaaccagtgatccggttggcccgttgcagggttcgctggtgaaaatacccggccattgtaatggacaattacatctgcatatgtcattttgggtccaacctgccatccatcgtctacaggtgttgccctaagagcgttaactgttgtgttgagaaaaggtgcggctatttgcatggcttgctcagcactattaacaatgcgcactgattcactgcttgcctgagattgctgagtagtcggttgtgtggaagcttggcttgtctgttgactagtttcgctgtcgggtgcacttgtagcagcgtgactttgtgtgttgacggcagattcagatggtttctgagttgtagccttgttttggacgatcagtgaggccaccttaaggttatctgttgtagcaccagcagtcttatccgccccatagctataagccaataagaaatctcggcttaagtagcaaaactcgccaacaccattaaagttggccgcagtcgctgaatcaaacaaccctgtaactgtcttcgttcgcattggtgcaatagtaagatcaccatgcttcactgatttgatgggtgtcccagtattacttgtgcttaaaataaacttactaaggtcaaacttgagctggcttttagtgccatttctgaccttcatatcaacgatgtactttccgccgtcttgggagtcatctgcaacagctttaaaagtaaagaacaccattgactgctcctttttatctagctgatgatagtacttgctagcaatctcaacggagctagttgactcgggcttgtcagtcgcggatggtgaccaacatcccgccatagtaagcgcaagcaaaccgaagattaccattttctttaacatttgtaccctccataagatttgatgaataaatagatcaacaacagtatagctctcactattgaccaccagcaatttctttctggcaattatccatagcacaaaaatagccctaccacattaggtaaggctagcatgcctgctggtgttattttattttcccaaattatatgtgatctcatgttatctagatgctaaataaaatgttgaaaacagccatgaaacaagctactttttcgactatttgaaacacccctcaggaccctaagccagtaaattcaacaatgaaaacatagataaataactagatgcgcggttccaccctacttcagatagaaaaaactacctgcggcttcatcatttggttcgaaaacgccaatcacaacaaccgttatcaggcttacactttccccgactcgcttcaaaaggtttcgttgcgaccctttttctcatcaccgattcaatttccttattagtattgcatcgcgaaaaaacctgtcaagcagagtgtgagcaggcgagctgcgcctgcgaacacgtttttgaagcaactgcagacattgccatttctcgttctattctcggtgggcagtccccgatactccgagttggctccgcggcgattcggggtggcgaccgcgcagctagagtggtgggcacgactgagcccatcgccgctccgccaactctctgctttctattttcagattgaaatactgataatcgtgggctattggttaaaccaacaaacaatcatttacaaaagttccttaagtgccagaaacttcatcgatccgctccttgctattcttccacaattcttcaggtgtataggtgtccttgtcgaagagtgtcaaggtgccgtcttcggcaatttgcggatttgccccaaaccattcccatgttggggcaattatcaaattgacgcgcttgcctttgcctcgcgtcggggaccaagcatccaggtagtctttgatgaaatgtgaacgcatataacgagtctggccgttatcaaactcaatggccaatatattggcggccagccagactttgacggcttttggtgttatttctgacataacgcacccttctttacgtaatgcaaaacccaacgaccatttattgcattaaaaaaacgcttactacatgatagtataccaccgtagaccaacaagtgatcgtgcatttgtctttgtccaaaaaaggaagccaattcccgttggcttcctttatcagaagattgctaattaatgcaccccagaaacttcataaatctgcgacttgctattgccccaaagttcttctggcgtgtaccgatcggtttcaaagattgtcaagctaccatcagcggcaatgactggattggcaccaaaccaagcccatgttgggtcaactatcaatagtctacgtcttttcttgccttttggtaatgaccaagcagagatatattgatcaataaaatgtgatcgcatataccgtgtttgcccattatcaaattcaattgccaataaattcgctgctacccatactttcacagctttcggtaaggttcttgccatgacgcccgctcctctcaacaaaccaaaaaatgctatgatctagtcaactgtttacgagttgaatataccatagccggcgaagatagttaatagtttctataagaaattaagaaatatggaataaataagtatcgttattccatctaaaagcgacatattacgataattaaattaattcagtgtttgtttcggagagttatccagtcaaaaatatgttgatagtaaataattatgccactgatatcagccatcattccgagtcatcaggcaggcgatcctgccattgatgcatctgatccaaaaaacgtttggctttcggggtcacaccgaccatatcagtgtagataacatccaaaattcgtcgtaattctgctttggtatcaggtttgacgttgatgcgctccactttgttgagatcaagcgtgctaaagcgtcgcaggtaaaaaatcgcccgcggactagcatgaagtcgatgcggatctttatcccagtgattttggcacagcaaaccgccataactttcggaaaaatcaagcggcaaatcggcgcgaccgtcaatcacacaaccgcgccagttaggctcaacgccatattctttaagcatctggacttcaatcacgttggcgataatctgtggatcgaggccagaatcaatgagatacaaggcttgtttgatttggttaaaccagaatccgactggccgcccatctggaaaagcaagatcgattaatccaaaaatataggctgcataagcatttaaggtgatgtcatcagaaatttgccgatattgagtcgcatttttgatggcagacaaataagatagaccggattcacgaacttcaccaatataatcagcgtgagtaaacggtaaaataccagcacctaaagtaaaaccgggcttacgggcccggttcaaaagaaacatttttttgccgaatcgatcggtcaaaattttgacaagcatatcagattcgcgatagttctggcgggacataaccagtccctcaaatgtttcagtctgcctaaccattatcgaagatccttcgtgttgtaccctaacgacttcagataagcattattatcacgccaatttttctggacgcgaacccataacttcaggttcaccttgtcgcccaacaggttttcgatgtcacgtcgggcgcgaatgccgatctgcttaagcatctgcccaccgcggccaataatgatgcctttttgactatcgcgttcaacgataatatacgcctcgatctgcaatttaccgccttcccgatctttcatgcgctcaacttgaacggcaacagcgtgcggcacttcatcgcgagttaattcgagaattttttcgcggataagttcaccgacaacaaaatactcaggatgatcggtgagctgatcttcggggtagtattgcggaccgactggcaatgcatcggtcaatgccgtcaatagctcgtcgacattgtttcccatcgttgcactaatcggaaaaacttgggcaaacgcatagtcatgctggtagctttcaatcaacggcaataaatcgtcaggttttactagatcaattttattaatgatcaaataaaccggctttttcacttccgccagttggcgcatgatatagccatcaccagggcctttttcctcatccgcttcgaccatgaacaagatggcatcaacttgattcaaagttgacaatgccgctttatccatataggtatccagctcatttttcggcttatgaatacctggtgtgtcgacaaatacgatctgcgcgtcaggagtcgtgtagataccgtttattttgttacgggtcgtctgagcctttggcgacataatggcgattttttcacctaaaatacggttcataaacgttgacttgccgacgttgggccgaccgataatcgcaacaaaaccagaatgatgttcactcaagcgttaagatctcctttcgaaaacgcacctggcagtaaagcctgtggcgtcgtttgaactgactgtccggcaacgttggcaagcgtgatgacagcattagggccaaagaattcgctaatgacttggcggcaagcgccacaaggggccactggtcccttggtatctgcaatcaccagcaattcatccagcttcgaatagcccgcgctgactgccgcaaaaatagcactgcgttcagcacagttactaagaccgtaactagcattttcgacatttgcccctgaaaaaatgcgatcaccgacacggacagccgcgccgacagcaaaatgagaatacggaacataggcattttctcgagccgctaaagcagctgtacgcaaaactgacaacttaccaactcctaaaaagggccaaaagtggtggcccaaagacataaataccggcgacgacggcaatcaacgacacgatgagcaccgcgccggcactcatgtccttaatcttcttcgcgcgcgcgtcatattgatcgccaacaataaaatcaacaacattttcaacgatcgtgttcaacaactcgccaagaaacaccaacaagattgccagaactaacacgaaccatgaaaaagcggaaacttgtaagacaacgccggcaacaatgaccagagttgcactcagaaattcgcgcttaaaattattttcgtcgacaaaaaacaccttcagcccatcgagcgcgtgacgggcactttggatgaaatgtttattcttgccaacttgtttatctggtaaggccataagctgcgaggattttcttttgaagcgggatcatgacggcttcatcttctggcttaatgtggtcgtagccattaagatgcaagaaaccgtggacgacggtgtaacccagctcgcgctcaaagctgtgcccataatcctcggcatggcggcgaacggtcagtggatcaatgaaaagatcaccgatgttctttgccatgccaggtagcagcggcaaatcgtcttcgccctcttcaatcgcaaaactgataacatccgtgacccggtcggtttcacgatactcgcgattgatgcgctcaatctcatcatccccaaccaaggtgatcgacatttctgtattttcaggcaacttaagctgtttgccgcaaaaagcgactagttttttgatgagatcatggtgcttgtcatccagcagttgatcgtcatcgaataattctaagtccatcccttactccttcgtcttcttctgcaacagcaggtcgtgtcgaccataagcctcaataatctttgcaacaaccggatgccgcacaacgtcctgtgccgaaaattgggtaaaggcaatgtgactgatacctttgagtaattgctcggcctgaagcagtccgcttttggcgttgttcggcaaatcaatttgagtgatgtccccattgacgatcatctttgagccaaaacctaagcgggtcaggaacattttcatttgtgcttgggtggtattttgcgcctcatcaaggatggcaaacgcattatccaacgttcggccacgcatataagctaacggggcaatttcaatcacaccgcgatccatgagccgatctgtgtgttctttccccaaaacagcgtaaagggcgtcatataccggacgcaaatagggatcaactttttccttgaggtcgcctggcaagaaacccagactctcaccggcttcaactgccggtctagtcaaaatgatccgctcaacttggcctgccttcatcgcggcgacagccatgacaacggccaagaatgtcttcccagtgcctgctggcccaatgccaaacgtgatatcgttatgcttaatggcatcaacgtactggcgctgcccaaagtttttgacccgaattggctgacctttggcatcgcgcaacaaggtttcactgtacatatcagcaaaatactcaagcgtcccacgcttggccatcgcaacggcgctagcgatgtcctgcggtgacaatttaatgccttgagctaataacttactagccgcctcaagtaactgtaatgtcaagctgaccgcttcagtatcaccatgaatccgcaactcatccccaaaaggcgagatctgcacattcaatccttcttcaatcaatgtcaaattagcgtcattgatcccgacaaggttaatcgccatgtcaggattactaagacggaaaattttctccgaggtttcttgtgccaaatattggccccctaacaaatttattaagcaatgatgctctcagtttagcatattttaagagcgcgagcaggcgcggttagaaaccggagcataagtggccttgagactaaatgaccggtctttggtcatttagtctcaagatccttatatgcaggtttctgcgcctgctcgcgcgtttccaagcaaagcgtgaagcaatcgtctgaccaaagttagacgatatttaacggaaacccattcgtcagcaaaatcagcactcttatctgatcaccacgcacgccattcacccgcaaaacccatataaaaaagccggctattgcaccggctttgtcgttaactaagtttttctttgaccacgctgctgacaagactgccatctgcttggcctttgacttttggcatcaacgtcttcatcactttgccgaagtcttgcttacccttggcgccaacttccttgatagttgcatcaacgatgtcaccgacttgggctttgtttaactgggctggtaaaaaacgttcgacgaccttgatttcagcttcggtttgttgaacgagatcatcacgaccgccttttgtaaattcagaaacgctttccttgcgctgtttaagttcagtcgcaagaacgctcttttcttcctcttcagaaaggtcgtggccgagtttaatcttctcattgaccaaagccgtcttcaacatccggacgacgctcaacgtcactttgtccttggctaacatgctttgtttcatctgagcgttaagctcatccattaaagccactattcaccaagtcctttaattaaaacttcttacgcttacgtgcagcttctgacttcagcttgcggcgtacgctaggcttctcgtagaactcacgcttgcggtattcagcgagtgtacccgacttggatacagtacgcttgaagcgccgaagagcgtcatcgagagattcgtttttcttaacaactgtcttagccatgtgatatccctccctccgacacttgtgtaaccactgacggatatcatagccaatagttcgtttattagtatacaaaactagcaaccacgcgtcaataagcgatttcacatttttgaataaacttgccctgttctgttaagttttttagttgtttttggcgtaaaatccctagcatcagcaaatggtcgaccttaaatagctaactggtctagacacgcttgtcaccattggtcgtcggctaaccgctcctgtttagttggtaaatatgctatgatagcgttatctaagtaatgaggtggcagtatgacgcaagaattaaatttatatatcatgtcggactcggttggcgaaactggcttgcggttggcgcaagctgtcgcggcacagtttcccaactttgaggcacattatgtccggttcccatttattcatacggaagaaaagatttacagcgcgcttgatgaggccaagaaggaaaatgccttggcaatcatgaccttcgtgacatcaggctttgctcaacttgcaacgcattatgccaaagatcaaggcgtgattgccattgatgtgatgtcgccaattttaagcgggattaagtcaattacgcatgaggaaccaaatcacgttcccggcgctgttcatgatcttaatgaacggtattttgaccgcatctcagctatggaattcgcggtgctgtatgatgacggcaaagacccgaaaggctttctcgaggcagatatcgttttgcttggcgtttcgcgaacgagtaaaacaccattgtcattgtttctcgctaatcgcaaccttaaagtggccaacttgccgctggtacctaacgcccatattcctgaagagatctggtcagttgacccgaagaagattgttggtttaaccacggatgcctctgttttgatggaattccggcgccagcgaatgattgcctatggcttgaatcccgacaccgcttattcagcacgcgatcaagtcaatcaagaactcaagtttgcggaagatctgtacaaaaaaatcggctgcatggtgatcaacaccgcccaccgatcgattgaagaaacagcaacgcttattttggaacacatgggtcttgatgaatttgataatactgaaacccattaaaccatcaagtggcgtaactcatcgggctgaaagtcccctgtttttagccatttgatctctgccccgtatggcggtacctgatgttttttgtcaggaccaacatacggggtttcgagtatcttgggtaattcggccaaggcagggtgatgagcgatcttgtttaaggcgtcaaacccgatcgtgccaaagccaatgttggcatgccgatctttatgactgccctgcggatttttcgagtcattcacatgaatcacactgagtcgatcaaggccaatgatgtgatcaaacgcgttgagaacaccgtcaaagtcctttttgatatcatagccagcatcattggtatgacaggtatcaaaggttacccgaagcttttcgttatgtgtcacaccatcaataatggcagctaattcatcaaaagagcgcccgatctccgtgcctttgccagccattgtttccaaggcaatggtcactttttgattaggatcaatgatctcattaagccctttgataatttgctgaatcgctgcttccggaccagcgccgacatgcgcaccgggatgaaaaggcatggtataggcatgaagagcatctgctcgagcgacttcttctcgcatgaactgcaccgcaaatgtaaagttttccggtttcttggtgttgccgagattaacgatatacggggcatgaatcacagtatgactaatgccgtcttccgtcatcgctgctagcccttcaggaatcatcatttcgctagttggtttgcgccgcgtgttttgcggtgcccccgtatagaattgaagcgtgttagccatataactggcggcttcttcaacggcaccaagcaacatttttgaccctttcatactgacgttagctcctattaacatgtttccctcctaattaattgatcgtttttgattttgacaaggtgacctgccgatgtcggatacgttgaacgattccgataggcacggcttgccaatgaaaaagcccggaatcgctccgggctaaatctgatggtcttaatccgttttcggctcataaaaatgacccagaattttgaccgaatccgtgatcgagacgaatgcataaggatcactgtggcgcatggcttgttctaaatcatacatttctgcccgcgaaatgatggtgaacagaatcgtcttttcctcgtgatgaaaggcaccttctgcatcgtgaacaattgtgatgccacgccgcattgaattctgaatctcattcacgacctgtcgcggccgggccgtgacaatcataacttgaagtcgttgctgccgcgtataaagcgaatccatgacccggccattgataaagatcgccaaagcagaatacagcgcatgcggccagtcattgacaaatccggcgaagaagataatcaaaatattgaacatgatattgattgtcccaaccgttcggcctgtgcgttttcgcaaaacaatgccgaggatatcaatcccaccggttgaaatattattccgcaaggcgaaccccgttccgagaccgttaacgaccgctccgaagatcccgcagacaatcgggtctttagtaagcggtgtcagcacaccgagcacccgaatcataatggtcgaaaaaatgaccgccaagaacgtgaaaaaagtgaaccgatggccaatggctttccatgctaacacaaacaacggtacgttcaggaagaaaagcagcgtcccggttgaaaaaagatctgttgttgataacgatacgaaaggcaatgcaatcgaaaaattaaaccactttcgcacgattgttgccaataactgcgctagtccagtgaccccgctggcaaaaaccccacctggttcccagaacatattcagcgccactgccacacaaatactatagaaaaaagccgctgatagccgtgaccaattttggtgtcgtctaatcagcttatcaatctcttccatacaaaaaccgctccctgtcacccgtaataagtcgcgcatcaagtataacaagggcggtcctgtattgctaccatggtctttttaaaacattttaatgaacagacttaaagagttgccgataatccccgtaaccttctttttctaagtcggccactggaataaaccgcaacgcagctgagttgatgcaatagcgcaacccgccttttgcagctggaccgtctgtgaagacgtggcctaaatgcgactcggcagatgggctgcgcacttcaacacgttccatgccaaaactttggtcgcggtgctcagccagtttgctgattggcttggtgaatgacggccagccgcagccggcatcgtacttgtcctgcgatgagaataacggttcaccactaacaatgtcgacatagatgccatcttgataaaagtcgtcgtactcgccagtaaacggccgctctgtcgctgcttcctgtgtcaccgcataagcctctggtgacaagcgctttttcaagtcctttttgctttccttttcaaattgatctgacaattaaaacacctcccgctgtcttcattatagcgggaggtgttttaattgtcagcaacttaattgtggctggcattttttaaagtaacgtttactcagtaaggttttcgtcgccttcatgttccttttcaggatcaacatcggcccgaacttcgataccgagatcttttaattgtgcatcagcaacgggatatggcgcactggtcatcggttcactagccttgctgttcttcgggaaagcaatcacatcgcgaatgttatcgcggcctgttagcagcatgacaaaccgatcgagtccaatagctagaccaccatgcggcgggaacccgtagtctaaggcatttagcaagaagccaaaactcttttgggctcgttctggggtgaacccgagcgccttgagcattttttcctgaatctcgcggttatgaatacgaatggaaccgccacctaattcgtaaccgttgagcacgatgtcgtaactttgagcatgtgcggcatgcggatcagtgtcaagcaaatgaacgtcttcttcatttggcattgtgaacggatggtgcgccggtacccaacgctggatgccttcatcatattcaaacagcggccaatcaacgacccagcaaaagcgaaatgcttgttcgtcaatcaaaccgagatcgtggccaaaatgggtccgtaaatagcctaatgcatctgcgaccaccttggccttgtcagcaacaaacaacaccagatcaccggcgttagcgccaacagctttcacgagatcagcaccatcgccaaagaatttggcaatcgggccgctgataccgtctgacgtgactttgagccaagccaaacctttggcaccaaaacgcttgatgtagtcttgctgggcatcaatcattttccgagaatacttgtcagcgccgcctggtaaaacaatagcccgcacttggccgccattttgaacagcgccggcaaagactttgaaatcagaatctttgacgagttcagacacatcctgaatctgcatgtcaaagcgcagatccggcttatcagaaccgtatttatccattgcatcttgccaagtaattcggtcaaatggcaacttgacatcaatgcctttcacatcatgcatcactttggcaatcaagccttctgtgatgtcctgaatctcttcagcagttagaaagctggtttcaaggtcaatctgggtaaattctggttgacgatcaccacgcaagtcttcatcacggaagcaacgcgcaatttgataataccgatcgaacccagcacccatcagcagctgtttgaacaattgcggtgactggggtagtgcgtagaagctgccaggataaacacgtgacggcaccaaatagtcccgggcaccttctggcgtgctggcggtcaatgtcggtgtttcaacgtcaatgaacccgttgtcgtccaaaaaatgatgcacgctgcgcatgatatgtgcgcgcgtaaaaatattcttctgcatttccggccggcgcaaatcaaggtatcggtattttaacttggtttcctcagtgacggccaccccgtcctcaatataaaatggtggcgttttagctttgttcaaaattgtgatggtatgaacttcaacttccacgtccccggttttcatatctttattgacagcttgcggcttacgcttttttaccacaccttgcacttcgatgacgtactcagagcgtaccgaattcgccacagctaaagcatccttgtcaaattcttcagagaagactaattgcacaatgccttcacggtcacgcaagtcaatgaaaatcaaactacccagactgcgacgtttttgtacccagccttttagtgtcacttcttgatcaacatactcggcggtcacatcaccggcataacaggttcgtttactcattttattttgcctccattacttgcgtatagattttgccaaagtcggccagcacatcagcttgggggaatgcttgctgatcgcctgtggccatatttttgatttgaacagtgcctgcagcgcgttcgctttcaccaatcgtcaaaacaagcttggcatttgctttgttggcagccttaaactgtcctttaggtttgcgtcccatataatccatctcgccggtgaagccttgttgacgaatggcggtcagcatttgcagggcctcttgatcggcaccttggtcaatggtcacaatgtacgcatctggctgcgccgttggcaattcgccttgcattagcaacatcaggcgctcaacacccatggcaaatccgatcccaggtgtctccggaccgcccagttcttcgactaagccattgtatcgaccaccagctaaaatcgttgtatagccgccaccaaacaccttatcatcggacatgacttcaaaaatggtgtgattataatagtccaagccgcgcaccatcgtggcatccacttcaaacggaatccccaatccctgcaataaggttttcacccgatcaaaatgttgctgtgcctccggtgtcaaataatccaaaatagatggggcattggccacaatttcctgatcatgcttgtctttgctatcaaggatccgcaacgggtttttaaccaaacgaaccttggagtcttcagaaagctgatctttgaaaggtgttaaatagtcaaccagcgctgcgtggaaggctttgcgggttgctggatctcccaacgaattgatcacaaatttaagatgcttggcgcttaaggcctccagcaactgttttgccaaagccaacgtctcggcatccaacaccggtgaatcactgccaaatgcctcaaccccgatttgatgaaattggcgttgccgaccactctgaggccgttcatatcgaaacatcggacccaaatagtaaaccttataaggcttagcatgttcaggaccatacagtttattttctacataggcacgaacgacgccagcagtcccttcagggcgtaaagccatcatccggtcacctttgtctttaaaggtatacatttccttagtaacaatatcactagtgtcccccgcgctacgcgagaatacatccacattttcaaaaatgggtgtgcggatttcatgatactggtattgtgcaaaaattttgcgagctacggcttcaacttgctgccagcgttcgctttggcctggtaatatgtcggctgtgccttttgggcgttgataattcatggattgcctcctgtggtttaagcactgtgatttagttggggaagtgtgctggttccgaaacgcacaaaaggacgcagaaacctgcgtgtaaggaccttgagcagtagtgacctgcacttttgtcactactgctcaaggccacttacactccggtttctaagcgcgtccttttgcgctctaaaaaaatacacccctcgattgctcgaagggtgcggacacggtaccaccttgtttttttctttgccataacggtggcgttccggaacttgttcacctcagaagtgtcttttcgatcgttcccggctttcaccatctccgggtcgcttaaagtgatctatcctacttcgtcacaggtcttagttattgcttaaagcatacggtttgctgaaagttttgtcaacgcgtttggcaagattttcacggttcattttcaacaaatctgttgcttgtggatattgtataatactgaggaaaaaagatgttagtcatgttcaagcataggcaaggagcgttatatcaatggcaagtaaatcagtttttgttaaagttgatcgccccatcggtttttcagacaagtcgcatgcgccttatccgattaattacggctatgtgcctacggttaccggtggcgacggcgaaaagcaagatgtctacattgtctccgacctgattaatgaacccttgcaatcgtttgaaggcaagttgattgctgttgttcaccgagcggatgataacgaagaaaagtgggtcgccaccactgaaaacgaaactttctcggcagctgaaattgccgcgcgcattcattttatggagcaatattttgactcgacggtacggttaatctgatttcaccaaaatcactctcaggtttatacctttaagggtgacttttgatttaaaatttgatcaaaatgcgtccatgggaatgttcttcaactagttgatgctgcgcttgtttgatctgctcgacaggtaagattgtctggacgtgcgcctgaagtgtcccatcgctgagccagttaagcaaccttttatacccgtttaacccaattgagccatttgcaaactgaaatgtctgatcttgggtatgttcaggaaatgtcgttgttgaaagcgacagcagatcaaaatgccgggtggccgcaatgattgcctcgagtaaatcgagtcgtcccactgtgtcgatcaccttattagcatgtggcagatttgctaactgcgtagtgacatcagccgagtaatcaactaggtcatcaacgccgagctttttcagaaaatcaaagtttggtggtgaagccagtgcctcaacatgtgcaccgaccattttcaaaagttgaatcaaatatgtccctacgccgccagaagctcctgtcactagcacagtgtctcccgaactgacttgcatcgtattgacagccatcaaagctgcgtcagcaccacctataagtgttgctgcatcacgcaaccgaacgttgtcgggtactttaaacagtagaggtggcagatttgaggctatccgttcctgcattgcgccagcaggattagcgccaatcacccgctgtccaatcaaattcgatgaacgtaatgcaccgacttttgagacaacccccgaaaaaccgtaaccaatcactagcggcagctgaacgggccgcatgttctgtaaatcgcctttttcagtcatcacatcccacggtaagactggcacataagctgtttcaacgagtgccgtcattggtgatagcttaggatcgggaatttcaacatcacgtattgcatcaatgccagcaaaactaacctgttgaatgaccttcattttgcctcaccgtcttccatcaaagcccaacgctcaacaaaagtcgctaagtttgtcaggttgatcataaaagcatgtttagcaatgggtgctaacaatttcaccggcaagcccttaacacttgctgaatcaagcaaaacttgctctgtcacggctgtgccgttttcttcagtaatcagtgaaaaaatcacatcataagccacccgccccccagtgctgtgataaatcacagtattctttttaacgctaatggtcatttgctctcgagggttcagcgcgctgttcgttcgtaaaatgataaaacgatgaccatgcttatcttcgctgattgattgaatttctggatcccattcaatcaattttcgaggattagccaaaattgccatcaccgcattctgattcgcgtgaatcaataagtcattcgtaaaaaagtcttgcatatcagtcactctccttgtttgaatgactttatgataggcaagactacctttcctttaaaataagaatactaatatttaatgatccggtttgtagacaggctccttaaacagctccgaaaaagtaacggaccgctgttcagctagctgttgtttgtcagcctgatcatttcggtgcgctaaaatggccaacaaatagtaaacattagcgaacaaataatgcgaatcgtgtgcggctgctacctcaaggccacgagcagctgatgctgcacttttgacatcttgtccaaggttaaactgggtcaatgccgagagatagtaaatcactgtcacgttcggctcaaaaggtgtttgatcaatttgctcggttgcttttgccagccattttgtagcttgatcagcgtgtcttcctaatgccgaaaccagcgctagtgtgatctgaatgagtcttgtcaagatcgactggctctcaggcgcgctcgctaatgccagttttaggatttgcttaatttgcgctaggtctggcgaatctgatgcttgaaacgttgcgacactcaaatagtaataataagcttgcgtctgggtatctgattgaatcgcactgatgacatcatcttgtttcaaaaatttgagcaaatcggtgtactgatgctgattacatagtttttcaactgtctgattaaactgtgtcgccgtcccgacagcgtagttatctgctaattgcaaactgttaaggtcaatgccgagccgttgacaaagtgcaattagcaagtccgcattaggtgtataccggccattttctatagctgaaagcatgggctgcgagcaaatatcatcagctactacttgctgggtcaaatgacgggccatgcgtgctcgttttaagatgctacctaatgtttctgccatacgcttcatatcccttccttgtcgaatgattgccatggattattacgctttaaccgagcaaagtcaacaatcatctgtaccgggccgacgatcaccactttttaatacttcatgctactctgcgcgtacttctatcacaatccagcagcccacagcaatcaaactataaacggcacctgtcaccataccaactaggctcgtcgctagcggtagtggtccagtcaggccgcaaacgactaggaacaaaatgacagtccccagcagttggctccactggccggatttggtcaactgacccaacatgagactcaccaccggtaacatgatggcccagccaagtaacggccacgcaacgattccctgccgcagcaaggttggcagcaaaagtagtaacgaaaaggtaacacttaaccataaagtgctgttgatggcgcggcgagtcgcatggttcacggtaccttcccatgccgataaaccattcaaatcatcaggccaaccaatttgactgaagaaactcatggcccacaaatactgaatcggcaaaatcatcccgcgcaagctgccaactggcacaacccaagcaagaagccataaaccgatcgccactagccaccaccacttgttctgagaatggaaaagtcgatgtgcctgttggccaagcaattgttgccagcgaaaattggccgtccttgccgaatgaaaccgatcatcttttggccttggcaaatcaaccgttaattttgatttgcctgagttcgttttttggtgtagtggccgatgctccagacaaaaggcagccagtaacaccaacacgatgctcatcaacaccgtcccgccgattgccaaccattctgtttgtgttaacgccagcggctgaaaaattagctgatgtgtgcccgtccgactcaaatgatcattgccgcccagcatcagcaccgtgttaagcggatgtccggcagaaatggcggactggcggatcatggccatcaagaacgcaatacccgaaaagttaaaaagttggctgtaccaagtcatggtagtcatcatggcatataacgtcagaagtgctatcactaacacggtggtaccgagttgtcctcgcagtcccggcaatgtctcactcaaaacccctaagccgctaatcaagaagatcccaggcaccagactaaaaaaaggtgacaaaaattgactcaagctcaacccttgaccaggatattggatcaacagcattagcccgctgccaagcatcaccaagactaaaatggtgaacaataggcagcagctaaccagaaattgactcgccaaataacggaaccgtcgtaattttgtcgtcaacaaatatgtaaggacaccattttcccgatcagcatgaataccttggcgcgcgatcacaaggctcacaagtggaaagaacaatgacaacacgcaagcaacaccgattggtaaccaagtgggattattggcttgcgcaaaatactgtggatccaatactaatacccgaaaattgccctttggccgcggtgcaagaatgacagcagcaaaaagtgctatcaccgccaaaatacgaaatgagaattgttgggtgcgttcccgataatcaaccgcaatgagtcgcatcatcctttcctcaccgcctgactttcaaagaaatcgagagtcgcatcttctaagttaggcgctaccatgaccgcattcgccaccggcgcctcgtctgcaatcatgcgaatatgaataccatcgcttctttcttgcataccactaattcgctcacttgtcggcaaggacgcattgcgcggcagtgtgtattcccaaacgtgccccgaagctttgtcgagaaattgtgctggtgtgccttgaaaatgcaattgtccatcggtaagcaataataactgactggcaatggcctcaacatcttcaataatatgggtcgaaatgatgacaattcgggtttgcgcgagactgctcaataaattgcggacagcaattcgttcaactgggtctaggccaacagtgggttcatcaacaatcaccacttgcggatcacctaaaagactagcagtcagcccaacacgctgacggctcccacctgagtaatcaccgagcaaggttgaattgctgggattcaaatgcagcagtcctaacgtttggacaatttgccggtccgcctcgcgaggagcaatgcccttaagcgccgcaatatagcgtaaataggccaatgcggtcacatgtgcatcataaggcacctgctgtggcagatagcctaaaacttgacgcattttttgcggttgcctgacaatgtcaacatcatccaataaaatcgtgccactggatggttttgccaatgttgctaagagtttcagtaaagtcgacttgccagcaccatttggtccaatcaaaccaatgaccccattggcttcaagtgtcgcggttatcccagtcaacgcttgtttatccccaaagcgttgaccaacgtttttcaaaaataatgacatgagacatgcacctcctgaaactagtttaaaattaataacttatggcaacatcaatcataagttgcacttggcgtcagtctttagaccgaaaaagaatgagacataattccttattggacttgtgattcattagattctgaataatctgggaaacgtatagattagaattctttgccagttcggctccgcagcagtacgctattactaatttcgcgcccactctactaaaacaaggaagtgtctttatgtggcaagataatcgtatccaagcagccattgatggtaccaatccaatggtcatggctgagctacccggcggatttgcggtatttggtgatgttcaatttttacccggttactgtgtgctccttccaaaacagaatattaccgatctcaatcatctcgaagagccagcaagaactttattcttacaaagcatggatcagttaggcgatgcggttttggccgcttgtcaccgggtccgagtgaactatgatattttagggaatacagataattttttacatgcccatgtgtttccacgatacaaaacggaatccgcggagcgacttgctaaacctgtttggttatacaccccggatcattggcacgatccacaatatcaatacaacccggccaagcatgatgcgattcggcaaaaaatcactcagtttcttttggcataagcgtccgatccgactggtaagggttactgcgaattgtcttgttgtctagttcttaacgcaacttaaacgtgattacgccactttttctaatgcgatttgctataataggattaactatcttcagaaaatggtgggctcatgaagaaaattggacaattaaaaaaatggccgctggtcgttctggtggcgctacttttcggcgttggtgttgccacaaccagtgtaatggccaacacacaatacatgactgtcaaggcagataccgtcaacgtgcggttaggtcctggtttggcatattcaattatgggacaagtgaaatccggtaatgaactgtcgattatcggtgcgaaaaactcctggtatcaagtccgactagctggtaataaaatcggctgggttgcctcttggttggtggatcaaagtgaggcagcaacttcacaggccaaagtggcaacggttaatcaaccggttaacgtccgtgaatatgccagtcaaaatgcaaaacaactaggttcgctaaatgccggcgacagcgtcaaggtcgtttatcaagaaggcgcttggactcagattgcgtacaacaccacggctgcatggatcaccagcagcagcgttcagttaaccggccaaaccaccaatttagcccagcctgcgcaaacggcgttggcaaacgagaaaagtgcgccggcgttgaaggtaacaaccaatacgatgaccaaccttcgcaatgccgccggtatcaatgcgccttcggttgaaaagctagacaaaggcaccgaactgacggtctctaagcaacaagatgattggtatgcggtcacggcaccagatggcaaaactggctacgttgcgagctggaccgtcagcgcaccaaatgacgggcaaacgcaaaaagccgctacaaaactgtcagaggctacgattgtccttgacccaggtcacggcggctccgacactggtgcgattgccaatgatggcaccgactatgaaaaaacatacacgcttaagacggccaatttagttgctaactctttacgcgcggctggtgccaatgtcattatgacccgtacaacggatactttcgttgatttagcacctcgaccaaatactgccaacaatgctcacgcggatgctttcatctctttccattttgactccagtccatccaagaattcagcatctgggatcaccacctattactacgacagcaaaaaagaccttgccttggccaagtccgtcaacagtgctttcagcggccttccgctggaaaaccgcggtgtcgcctttggtaatttcgaagtcctgcgtgataataaacaacctgctattctgaacgagatgggttacatcaacaacgataaagatttccgtcaaatcaaagatccgagctatcagtccaagattgctaccgatattgtaaatggcctaaacgcctactttaaggcaggcaatcatcagtgatgaactaaaaaaggtcctgacattgagtttacaacttcaatgcaggaccttttttagagtcgataataacttttaaacgcggaataatggcgggatctcttccagatgatccacctgaaaatcagcttgcggtgcggcgttcaagccgtcaacgttaaagtagatcgttttgacgccagcgttaatgccagcgtcaacatccaatgagcgatcaccaatcatcgctgtgacagccggatttagctgaaatcgtttgagcagatactgaattgaatctggtgccggcttgcgtggcaaatctaaatcggcatccacgccacccaaaaacaaatcagcagcatgatccttggccaatattttccaagcactgtggtcgcggtgcgtcaacaaaagattattcccgccttgcgacttgatcgctcgcaaaacagctaaggcagtcgggtaaggtttgatatcctgcaaataagccgcagcccgatggtggtaatcagcctccaaatcggtcacactgcggccgatctgtgccccaaatgtcgtcaaaaattgtttgattgaagtctctttggttgttcgatacaaagcggctaaatcaaagtgaccaccgttgtctgtcaccaaagcacctaacgctttcatcatccccgggtaggaatcatacaaggtcccgtcaaaatcccagatggcattgactagcatcatttcgcctccgtatcaaataaaatcgtaactggcccgtcatttgtcaggctcacctgcatatcgccaccgaactcaccagttgcaacaggcacacctaaagctttgagtttggcattgaaggcttgatacaaacgatcacctaatgccggatcagcagctccagtaaaactcggccgattgccgcggtgagtgtcagcatacaacgtgaactgcgaaatcgatagcacttggccacctacatcagctaaagccaagttcattttgccgactggatcactgaacacccgtagcttgctaattttttcggccaaataatcactgtcggcttccgtatcagttggtccgacaccgagtaaaaccacaaacccgtggtcaattgtgccgactgtattgccttcaattgtcacttttgcttcaagacttcgttgtaccactgcgcgcatgaattcaatcccctttatttgcttagcatgatcaaaaaaagctgcttactcaatacggtagcagatttctgaccacctgtcttgagcaaacagcatttttatcgtcaaccagccctaaaatcagccattggcgcgctttacttcataaatatccggcacatttttgactgcatccatcaatttatccaaatgagcaagattgcgtacccccactgtcacgtgaatgtcagccattttgtcatggtcaacccggccgttaatgttgtttaacgccttggtctgggcatttagaacctgcaacacatcactcagtaaaccgctgcgattataaccgtagatttccaagtcagtatcaaaaagctgcttttgggcttcttcattctcccagcggacatcaatcaaccggccggccatttcaccggaactttgcacattcgggcaatcggcgcgatgcacggtgaccccgcgaccctttgtgacatagccaacgatcgcgtcaccagggacaggcatgcaacacttcgcaagatgcaccaacaggttatccacgccttcgatgacaacgccatcttcagaatgggtttgtggctgctgatgtttgtcgcttgaaaccgtcgtaaccttttgattcttggacagaatttcggcttctttagccttccggtctttttcagccttgtcatgccggaatttctccgtcaaacgattggcgatgactttcggggtatattcgccgtaaccaattgaactcatcaattcatcaaccgtttgaaaattgaggcgctgcatcaagcctgtcatattttccttggtcaagaaatcttttggcacgtaaccttcgtccaaaagttcacgttccagcatatcacggcctttttcagcattctcgcttttatcagcctgtttaaaatagcgcttgattttattgcgagcccgtgaagtgaagaccagtttgatccagtcgcggcttggcgcactgccactagccgttaacatctcgacaatgtcgccgtttttcaaaacataattcagcggtacgattttgccattgaccttagcgccgaccgtgtgattaccaacctctgtgtgcacaaggtagccaaaatctaacggattactccccttaggcagctcatagacgtcacctttaggcgtgaaaacgtaaacccgatccgtgaagatatcgcctttgacactttccataaaatcggcagcatcgctggtttcatcttgaagctccagaatttcacggaaaatgtcgagtttcttaccggtcttatcgtactcaaccttgctggtctggccttctttataagcccaatgtgccgcaacaccatattcagccacatggtgcatttcttcggtgcgaatctgaacttcaagcggcttacccatcggtccaatcaccgtggtatgaatactttgatacaagtttgccttgggcatcgcaatataatccttgaatcgcccaggcatcggcttccacttagtatgaatggcgccaagaaccgcataacagtctttgatcgtctcggtaatcacccgaatggccaacaaatcatagagttcatcgaactgcttatgcttgtcgcgcatttttttgtaaattgaatagatgtgctttggccgaccgtaaatctcatatttgatgtgtaaatcagccaaggccttttcgatttcatcgatggcttcctgaatataagcttcacgttcagtccgcttactattcatcaagtgggcaatgcgatagtactgttgcggattgagatatcgcaacgatagatcttcgagttcccatttgatggtactgatccctaaacgatcagccaagggtgcgtaaatctccaatgtttcgttggcaattcgtcgttgcttatcaggccgcaaatgttgcagcgtccgcatattgtgcagccgatcagccagcttcaccataatgacccgtagatccttggccattgccagcaacatttttcgatggttttctgccagctcatctttatgggcaacataggtcactttgcttaacttggtgacgccatccacaatgacggcaacatcatgaccaaacacttcttcaatatcgcccaaagtaatattggtatcttcgacgacatcatgcaaatagccagatgcgactgttgctggatccatttttaattcagcgagaatccctgccacctgaatgggatggataatgtacggctcgccagatttgcgaacctgatccttatgaacatatgcggcaaacttgtaggccttttcgacgaatgccaagtgttcagggttcatgtaagctttacacaacttcatgacatccggttgggtgagttcaacttcttcggccattctattccctcctgaattccacgccttcacaggcacgcgcacgctgatattatgagaagggcgataagcacctgccaaaagaatcttaggcaacacgcttatcgccgcttcgctacgcttgctgtttcgcgtcagtgcgcgcttttatctcaacacaccgttttcaaaaagcagtgtgcgtgacggttcacttttcttagattacccttaaattataacgattctatgtaaaaatgctagtcctttgccattgcgagcagactgagcaaaatatagaccggcacaaagaaatagccataccattgataacgcaaaaaaaccatggcggcaaataaaactggcagaacgaataaccaccaccaagccaaatgatgccgatgaatcatcttaccaatccaccaagcactgaacatatcgatgagaataaacaaaacaccgacacgaatcgctgtgctgatatgaaataacggaaatagccacggtaaaatcaaggtgatcagaatgctccaactaataacactgttgcggggcactttgacccaattgagaatacgactcatatgaaaatgttctcctttaatgacacttatatagatgttgcttgtaattctgttaaaaccgacacggcactaagcaagtaaagcggtgcagtttctgcacgtaaaatgcgcggccctaatcctgcagcaataaacccctgccccgttaaaactgataattcttctggtgcaaggccgccttctggaccaaaaaccacacacaacgaagcaggccgaggcgatagcgccgagattaaggcaccatgctcaccttgtttggcactttcctcataagcgaccaatttcgcctcggcagtctgccctacctgatttagcttagcatacatcgtcacatctggaacctggtttcgatgactttgttcggcagcatttttagcaatttcctgtaaacgggcgatttttttaacaacccgttccgccggccaccgtgccgttccccactgggcattgaaaaaaccgattttgtcggcacccagctcagtagctttttgaacgatccattctgatttgtcccctttgctgacaccacagacaacttccacagccagtggcagttcaacttttttagttatgtcttcatcaatcgcgacctgtagcggcgacgactgctgaatgattgccaaatatgcgtggtgcatggggtcaacgagttcgaaccgatcaccaatatcctgacgcagcactttgatcgcatgtttggcaatggtcgcatctaactgaacaacgtcaccggttttaagtttttgatcggtaaaataccgctgcatctgatgtcctcctcataaacgaatcgcaagcactagcgcaaaaagctgcacattagaaccttggtcagaatcgtcaaagcacggccatttcggctaagaacgctcattgctttgattgctaaccgtgccacctcacgctgtttctttaatcactgcgtctaatgcgacccaaccaccggcttcgcgccgctgagcaattgaaaagccattatcttctaaagtccgaataattaacgtcgccttgttggcaataatgccagcaagcaagaagtgcccatgagcttttaatcgtggtcgcacttgcggaatcagcggcaccagcacttcggccaaaatgttggcaacaatcaaatcggctgacaaggtaatgcccttcaacaagtcattcgcgatgacagtaatgtggctaacaggatttagcttgatattagcctcagcatttctaacggcaatttcgtccacatcggtcgccaaaatgtcaccgacaccaagccgttcagccgcaatcgctaaaatacctgagccagtgccgacatcaatcatggtttcaccaccgcggatcacggactccaataacgaaagcatcagctgggtcgtcgggtgtgtgccggtgccaaaggccataccgggatcaagtgtcaactgcaattcgcctgcttgttgcggcgtataatgctcccacttgggtacgatggtcaaaaatcgcgaaacgcgtaagggatggtaatactgtttccagacatttgcccaatccgcctgcctgacatctgccaaggtgacggttgcagcaccaggatccaggccgaattgagcaagcccgcggacccgcgttgcaatatgatcgcgttgttcaacaagtgatgttgctggatcaaaatacccaatcacttgtgctccggaggccaaatgcggcaccgttttcgggtcaaaccaggtaccgtgagcatccacggtttcttttttgaaatcagcggcgtctttgatttgaatcccaaccgcccctgcctccattaaaatattgctgaccgcctcaatggcttcagtggtggttgtgaccgttaacgctgtccaatcattcatggttgcctcctttaaacgtgttctttgatgcaaaaactgctactgtccagataccggcttgaaaagtcagccgaccggtccttgcagccaatattctttcttctttggcaggctgactagtacttgggatagggtaaaaagacgcggttatcctcctccggctgttccgccagaatccgttcaaatgccgcatcgtcaaaattcaagacgaaagtatcatcgtcagacgtgccgtcgacaaaatccatgaggtcactttcgctatcgtctaaaaaatcctgcagatagataaacaaagcatccactgtggctttatcaatgcccttcttaccattaaacccgaaaacagctaaataatcatctgcatagtcttcaccgtgcagccgggtttcatcataaaataaaatggcatcttgatattcaactggcccattgtcaacggtctcaccagattgatcttcaacctcgataccagactcgctttgtactgtcatcgtgatttcaagttcaatcacatgggcatctttatcccagtttagacttaaatcaccatcgaaatccagcgcatccattttgtcaccaattgcatctaacatattgatttggctcatgattgccatcctctcgtttttaaatcctaatctcgccgagctgtgcctgatacaaacggattcccctgaacggaaaaacgcaaaggtgcgcttgtccaaggttctttgtttggaatgccaatgcgcggtcctatcgtgatgtgacgcggctgaaatgttgtcgccgtcagctgcaagccgccagcgtttaatcgactgccgtcaagcgcacggtcaattgccaatgcctgacaaagcttgcccgggccattggtcaacccaacgccttcttggtgccgacgttgctgcattttcgccataccagcttgcggctccagtgcccgaatcaagatacactccggcacctccgcagttcgcgtcacaatattcaataagcagtactggcgcatttgataaacataaacgttgcccgccggtaaatacagactgtgattacgcggtgtttttcgaccgccaaacgcatgcgcggctttatcctctacacctaaatacgcctcagtctcaacaatcaaaccactgcagccagccagactcagttgcatacctagcaattgctgcgcagattgaattgttggctgggttactaaccatggtatcatcatgcttaacatcttagcctagctgcgcgcgaaatcaaagaggcagcacagctttgcctaaaaatctttgccgggtataatggtatcaagttagaaaggaagctgaacatggcagaaaacttggcattgcgcgcattaatcagccaacagacagatgcactcgtctctgaactctataccgacgacaaggtcaatgcacgactgcagacgtggttagcaaaagtacctgatcctggtgtagccgatacctacagttacctactgtcggaatctcgcgatttctctgaggaacttctctatcgcattctgacaaagcttgtcgaggatggttcgctcaaactcaaggagcaagcttagtaaaaaataaaaagaacgaagcagtcagctcataatgagcctgcttcgttcttttttgccagttcccgtttactcaagcttagaaagcactgaggcagggatcgcatttttattcacgacttctgggcctttgataacccgtttctcggaaacagttgctttcacataagagccaggctgtagttcagttggatttgcagattcgccagactcatatccaacttcgcgtttttgaccatcctttgtcacccaagtgaactcataatcataatagtaatactgtttaccattaactttataaggggagccatcattatttttggacgcatgcttggttccttgtgtcacctttgcataggattcaacgccattataggtgctgttccaatactgatagccgaaaaagcccaagacaatgacgaccaataagaacacaacgccgaatgcttttttcatatttgtttcactccttctcgataaaaatagtatgccaaaatcgtgacctagattcaacactttcaacggcttttacggctttcttaacgcgtgacaaaagtgtaagaaatgtaagcttgatgcgggttaaagccattctgcaatgctaatgctttatccatcagcattgcatatcatgagatttttaaaaacaaaaaggaactaactgaataattaattttattactaatattatttaatgcgtatgtcactggtatgtaagaagacaacttatccacgagggacatcgttcacttctcttattgataccttgcgaaaatgtgatggttgcttaaatacaatttctatatcatctcatcgaatcccttgacggcttattgaccaaaaaaagtgttggcagtctttaacaaatcaaggctgaaccaacacttttgtaataggtattaccaccccaaaccagatttaatgtcgcttaggtcgccgcgaatcatcttttcgcggcttgcgcttcaggcggctgaaaactgactgtacggccttaaaccgttgcggatcacggcgagcatcctgcacgaattgactaaaatcatgatcgccgatgccaatctcaggcggttcttcttttttatgctttaaccaggccatcacgacacctccgaattattatggacacgacgagatcgtttggcgcctgacaaaattaagaacatggcaacagccaaaccaatgactgcaaagacactgtagttcggaatcagaatgaaggcaataaaggcacacaagcctatcagattgcctattaaaagcagccgttgattctgactcgcaaaatacgacagcaaatgtaagacgatcccaggcaacgtcagccaccacaaatgattggcccactgcatcagtgttgatccaacacccgtcaatgagaagccgtttggcaatgtcgccatgatggcagcaactagcattaccaaggcaaaggcaccatataagaggtcatacagtgccggtactttcttaatggaaattttcaagtgtcgaccttcccttgtttagcgataatcgtattatacaaggttaaacgtggcaatgcacggaagatgaaaacgacttaattaaaataatagtgtttcgggaacggttggctattaaaaatatcgctttaagcgggggctgaaatttttgtccaaacacttcaaatccagaaaaatattcacttactaatggttttatagaaataaatgatggtcatcccgggttttatggccgttatcttggtggtgtcctgaacataacccatttttctgtatagatgaaccaactttttctcttcagcaattgtatccagatgccatgtcgtgatactcggataaaagatttcaatgtcacgtagcatttgctgcgcgtaacctcgaccctgaaattgcggtaaaattaacaagggagataaacgtgcgatctgcctatcctgactgacaatgattcgaagcatacctacgcgaacatttccgtggctaaaaaaatataagtgattggtaggacgagaccacttttcttctaggaaaactaatgattcaaaaaagggtcagtttggtcatcctggtacttcagagagatgggtttgaaagaggcctgatacatctgccgaataagcggtaaatccgcttgggtgacggtagcaaaactaaaggattcattcatagcgatctctccctaattgataaaatcaccacggcttattcatagctcacagcttaactggcaactgaacaacgattaaccctctgattcaaccgtaattatcacacattttaagacaatagcttcccaaaggtggtctgttttgttatactagttcttgtgttttggagagttggcagagtggtaatgcaacggactcgaaatccgtcgaaccggctaataccggcgcgcaggttcaaatcctgtactctccttattatttcgataagagccgtctgatataacgccagtaaaaggtgtggtatcaggcggttcttttttcttcccgaaaatacgtctctattgctcaccaccaaagtgatggttatgcgaccattttctttgcacagaatttaattcaaatctaatcatccagcgggctatgcgaagaagctatttaagttcatttagaaaacatgttggcagcatcacttaggcaagtatcaacgcttggcttctctttaatcgtcgtttgcagtttgtttttatttccgggaagtcaacactttttcggacagtttgctaagcgactttttgtgaagcttggtcatacaaggaaagccatgctactggtgcaagatagtctaagcgtgcttgtacccttacgcggttgtaaaaggtctcgatgtaagcgaagacttgcgctctcagatcattgatatctttaaattgtatctgataaatgagctctttcttcatgatggcaaagaagctttcgctccaagcgttatcacccggttttcccaatgctgagaagctacgttgccaatgatattggttgaccaactttgtcactgctttggccgtgtattggctaccacggtcactatgaaaaatacacgtttctggcaaagcccacctttggtgggcttgtttaagtgtcgctaagactaaatccgtgtccatatgattggatatttgatgagctaacactaggttgctgttcaaatcccttatttggcaaatgtaagcttttccttctgatgttgtcgtctgtgtaatgtcacttgataaggcttcaaacggcttaaaagattggtgtttcactagattgggataatcaccttgacgagcaaggcggctatcggtcaaactcttcggatgacgacaacgtagcgttgaatacagaccgccatcagccatcagacgggcaactcggtgataggaagctttattaccatttttacgcaataaaccgcagatgcgtttgggcccgtaagtgccctgtccttgatcaaaaaagtgtttgattcgttgacgatattgcctttctttggcgtttcgctttggcaaagctctccgccaagcataataaccactcgttgatacgtctaacaaacgcgcccaccttaccacagaaacagaggtttccctcaacataaaagcatacttatcgctgggggttacttctggagactggcaaagtaggcagcggctttttttaacatatcacgctccaatgctaattcggcattttcacgttttaaggcacggttctcagcttctaaagaagcaagcggcgtttgctttccatcttcggtatatagcttccgccaacgatacagggcactttcaggaacaccaagttcggaggcaatgattttaactggtttggaagagttaaaactcaaacgtaccgcatttttcttaaaatcttggtcgtagcgattgcgtgaataggtcattttgaggactcctttcggataaatcaattctcttatgtttctgtccgaaattctagtacagaccctccagcaaaagcagtgatcaaattatttatatctaattgttctattaagaagatacagacatctaatctcccactctttatcggattgtcttattctcaagcttcatatttgctctcctcttggttaaaaaggtggaaattgatcatttcgtctgggaaataacttgttcaaaaatcggtggattatattctttgaccaaaatcttcaacccaaacacacgaacaagtaatcgccaagctaatgtcggcgacaaacattaagaacatcaaaccgatcgctagaattatctgaccaatgtctaacatagaattgaacagataacatcatgcaaaattcaaagggaacactagccaaacaaacttgatgcactaaccacgaactgatacattttgcctgctcgtcttcgctatgcaacaagttgtttgacggcttaactaactagtgtgaaaaccggtgcccgaaaaatgtaactttctcccccgcttctactgactttagcttcggatgaaccccctatcgtcttaaaaggaataataacaaagaatatccgaacagaagaaggtaaattgggaacttaggttattttaagcagcaagtcaagttattttgatggctacccttgcttgcgttaattaaagcggccaagtatgccatagcaaacaaaatgtctgccactatttaggtcaacaggatgttgaattgttggcgtttcacggatagcgttcagtaaatttaaaatttcaacgggatttaaacacggtatttgctaaaaacgaaagctcttttcggctacttgttgtaaatatcgctgccgttttttcaaagtagactttgttatgccgccaaaattataccagtaggcgtgttgcaccccgatttgtttgagtgtgtgatgcacaaaaacaccattcagcgcattgccgcaaaataatcgaaggtaaaatgttggcgaagtcgaagtcgtgagaacgtaagcatgttgtaagttagtcagtaaacctttcacgccggttttagtcacaatatgacttaatcccgggccttctttcatcactttatcaatgaaccccttcaacattgctggaatatcattccaccaaactggcgaaatgatgactaaaccatctgccctttgtaagagtcgcaaatatttctgaacgagcggatcatgggttttaccagcatgaaacaagcgaagttctgccacatcataactaggaacaaattggtcttgataaagatcaataaccgtataggacacttgatggtgatcaaaattatgttcgactgcttccaaaattgcatgattaaagctttttgcatatggatgacaataaacaatcagaattttagtcatttgaaacctccaatagatccttcaatgttttacgcaccagattaggatcataactcgtaatgccactatcaattaacaaaccgtatccttgaataaatgaccacaactggataaaaagaatctgggggtcaatagtgatcccgcgtttgagaagtacgtcttttattagttggatcacttgatcgtaaaatccgaattgcccaggttcgactttcaacacatcgcgagctgctggattgaaaaacaaaaagtgcatcaaatgcggatctgcttcaaaccgctctaaaatttcggcagccatcaccaaaagtttttcttctggatcggtgatttgccccagcacttgcgccatctctgcctcctctcgctgtgacagaagctgggtaacagcgcgcaatagagcgtccttggttgcaaaatgcttgtagaaagcgccagttgtcaatccgatggcccgtgccaattttcgtaaagatagctgatcttcaccattttcacgaatcatattcatcgcttgttctaaaatacgttggtccgtatcatgactgattcctaccaaatactcacccccaaaaaaagagataacaccgttaccccattaattaattatagggtaacagcgttatctctctttttcaatccttaattttagtgttccagcaatctttatcgtaactgtttcagaaagtcccgcaaaaatcgcaatctatcttgcgctttgcaaaataaatcagtctgatgccgagtcaacacttcttctctaaatgagcgctggtcaatgtattgatcgtatcgtagctcaatttgaatggcggtgatattaggttgatggccgtagtagcgcgttatgtcgccgccacgaaatggaaagttattttcaactgtgaaatcatgtgcgacaaacgcggcggatagcgtttgtcgaaaagttttactagttgttcggtcatggtcattgcctaacacgattgtttttggcttgataccagggtaatgaggatattgggcaaaactatgcaagtcaattaagtaagcatggccaaattttgcctgtttttgctttaaaatcattgttagggcgtgacgatacggccaataataggttctcaaccgtgattgcagtgtttctggcggtagcggccgcgcgtatagaggatggttgaacgtatttcgctgataaattgtggcagaacgataatcgtgatctaaatctaaggtaacagcacgattgggatcggcgacatagcgattaacacgattaatcagcgtcgtgaagccggtttgcggcaggaagtcataaagcgcaggcaagaaccagtcggtattggccaacacagccgttggcaataaatgcttacgcatgtcagccgggatccaagtaccactgtgcggcaatctaatcataacaggagatgctgcgtctgcatgcagtaactcataggtagctgacagttgttcgttttcgctcattgtcttttcctcctcggtgactgttatcggatatagaacaggtacaggttgagacatacttctaagtcgacaaagcaaaagcgaacaattttccatttggaaatttgttcgcttttgcctgctcatagataatttattatgattttaaggaccgtagtgccaaggcggagcaatcgtaggccagatggggctcagccgtgcaaacaacacagcgacggtttgttgttaggcgacttcgagaccggtctttgggctcgaagcgccgtcacagcgttccagccccagctggccggagattgcggagtttggcacggcaaggaaattttggcctagcatcttcctacgattattcggaatttaatgaatcacaagttctatgagggtaagatggctcaccctcttccgcatacaggtgatttttaattacttctggtgtccttcttcaggcagcaagatagtttgactctcgccgtcgtcgtaagccatgactgtgtcgggaaaactgggatcatacgggaatggcagatcaactgacatctccgttgccgcgccactttcactaaaatgaacggtcagcttcccctgattattctgcagatcgaaacgtaacaagttatttagcggaacaaccccttgcagatttcgatcgatgatcatccaaatgctatcaatgatttcacctggcagattcgagatgacgccaaaagtcgcgaaccgactgtgatttgtctcaaacatacacgcgatctccttccttcagtcttgcgtggcaatatccgcaaattgtgcatcaacaaattgcgccaaaattttaggatcaatgccaactgagcgacccactttaccggcggaaacaatgatcgttgcctggtcctcagcctcttgactgataaaaataggatacttatgccgttcgtgaatgccaataggtgtgttagcaccatgctcgtaacctgtggttttcatgagatccttcagcggcaccatgcccactttgcggttaccagagaccttgcttagttttttataatcaacatgccgatcgagcggcacgacgccgaccaccggaccagttttgttgccggtcaagaccagcgttttataaatctgatgttctggcacatccagatggtcaattgtcagctgagcaacatcgcccacctcttcagtcggaaattcgtaaggcacataagcgatccccgctttgtccaacattttttcgaccaaggtcttttcaaccttattgtgatgtttagccatcgcgatccccccctaaacgcgatcacagtcgcagcaatctgcgtgtaagaacctcgagtgcgatgagcccaaacccggtcatcacgccttaggccacttacacgccggtttctaagcgcgactgctcacgctcttgcttaaatgcgccaccttgcgtagccaacctacatgcatgtaaggaccttggtcgcaatggtcaaaagacggccatcacgcccaaggccgcttacacgccagctgctaaccgcactggctcacgctctgtcttacgttaatcccgatgccacttaaaatactagggcattttgactgaaaataccactatcatgcgccagtgtatgacatcagcgtgaacatgtcatagtctttgatcttgtcgcggccgtgcaagtcgcttagctcaatcaaaaaggcggtgccgacaacgatgccgccaagctgttcgaccaagcgaatcgtagcagcaatcgtgccgccagtggccaacagatcgtcgcaaactaggacacgttggccaggtttaatcgcatctttatgcaagtataaggtggcttcgccatattcaagatcgtagctggctttaacggttggccgtggcaacttcccttttttccgcgccggagcaaagccaatacccagcttgtacgccactggacagccaacaatgaatccgcgtgcttctgggccgacgatcatttcaacgcctttgtcctgtgcgtaagcagcaatttcatctgtcgctgcagcataggctttgccatctgccatcaaaggtgaaatatcacgaaaaataatccctggttcagggtaatcctgcacactggcaatgtaatctttaaagttgatggtcatgattctacctcactgtctgaatgctccgtcagcaacatggtttcaagctgagcgcgcggcatggtctgtaactgttgcgccagatctagaaaggctgtgcgcgctgcataagccttcgccgtttgcagcggctttttcgccgggactgtgactggagaaataaaagcaccctctattgtaacaaaatcgagttcaaaaaacacctgaaccgccaagatcacttgatggacagttaaatggaccgccttagcaatcgctggaatgtgatgcttgtcgaacccaggatgggccttcagaaaacgcaacacggccccaaattctgcccgcgtcggtatagcaaccaagcggcttggtgcgccgtaaaacatgacggcaacaggtggctgcacatactgcatcacctgatgcaacgcggcagcatcttttggcaagtcgactaaaactgcattcgctaaaggcgcttgaacctgagcagcgatggtcgttggcccaccaaaggaaaattgccgctcaaactgttgctttactttcgcatcaaaaaacacatacgtgcggctggctttgaactggccgccgtcaatcgttggcattcgccagtcaatgacttgcggctgtttgacttcatagtctttcaacatgagttgtagactggtatgaccttgccaagtgttttgatccagctgaactgccaatttaacggcctgtgccgttgccagtgtttccgcagcatcaccatagccaaaaccaatcacattgatgccttggtcgatttgaaaacgcaggtgattgttttctttaccaatctgtttcacattttggataacttgcgggcgtactgagaaaaccggttcgggattgccttgaccaaacggtgccaactgacggatcaattgatagtgatccaatgtcaaatcagcatcttccagcctcgtggtgataggcaatgttggtttcggaacagttttcagcattgttgccgcagccgcctccatctgtgcatgaatcgctggtaaatccgttgttttagctgtgagaccgacagccatatgatggccgccaaaatggaccatgtgttcctttgctggctctaaagctttgaaaagatgataagcctcaatcgagcgacctgagcctttggcagtttcgccatcatctgcaatgttcataattaacgttggcttgcctgttgcttcgacaaccttgctggccacaatcccgacgaccccttcatgccaacctttactggccagcaataatgttttggccgcttggttttccggcgcctgtgccatcgtcaaagcttcctgagcgatctttgcaactaatccttgtcgttcctgatttagcttgccgacttgttcggctaactcagcagctacgtcatcctcaaatgtcgtcagcaacgttacgccgggattcgcgtcgcccatccgcccaagtgcattcaaccgcggtccgatgacaaaaccgaccgttgtttcattcacagtttccggggcaacaccggcttcctttaaaatagccgcaagcccgacccgtggctgagtctggatcattttgagtcctaattgcgcaatcacccggttttcatcggttaagctgaccagatcagcaatggtacccaaagctgccaagtcaacgctttctaacggtggttcgcctaataaggccgttgcaaccttaaaggcaacgccagccccagaaagatcaccgaacggataatcgccatctggatgccgtggatgaacaacggccaccgcatgcggcaactttgctggcaactcgtgatgatcggtcaccaccacatccatgcctgcagcctgtgccggatcgatgactgcggcaccagccacaccgttatcaacggtgattaccaactgtgtgccagttttttgcaaataagcataaacttcggcattcggcccataaccatcggtgaagcgatcaggaataaacacatccggatcggcgcccagactttgcaaggtctcaagcatgatggcactgctggtcaacccatcaacatcgtaatcgccataaatcgtgattttttcattttgctcaattgccttcaaaatccgggcaacggctttatccatgtcatgcaaggcgaatggatcatgcaatcgactagtgtctgggtgcacgaacgcatcataatctgcctgatcattaatcccgcgttgcagcaacaaggtcgctaaaaatggtgggacattcaacgtctcgctaagagcatgctcatcagctgctgcaggttgtggggcgagttgccattgatactgcgtcatatcgtctcgttcctttctaaccgatccagtataccagagaaagcttagcgaattaaccggtaaacctaagttatctttggcagatgctgactgacagtaacacaaacagaatgcgtatcggcatgacatgttattgtgtcggacattcaatgcaagccgtccgtgcgactcattgaaaacgtgatataattaaattgtgaataagcccaactccagtcagcgacttaagatgtgtgatcagcttaagttggtcatgcgataaggaggaagcatcatggcaaaatctcaagaccaattcaatgcaaaggtcggtaaagaaattaacgtttctgacgaggccgtcgataaagcagctgcccaaatcgagaaagtcggttacgtcactgaaaaggacgttccggaaatgatcgatcgcgattacactcgggcattgtccaagaaggtttcggcaaaacttcacaaagacaatgacgatgattacttctacgaagagccttttgactatgaaaatggccgcattgcaaatatcatgtgggacatggataaaattaagacccgcgaagaagccatgaaaattttggctgatgaacttggccttaccgttcctaagattgtaatgcgtaaaatcgacgaacaggtcttctagtctggaggaccttcacagcttcagtttctgcggttgtggacgcggttcaactttaataaaacaaccggtatcctttgcggagccggtttttttgtgagcgcgaacaaaccacacttaaaaaacggcgcgtaagtggtcttaaggcaaacggtcaaaaccgtggccttatttttcacatgtaagccttttgcaattgcgagcacgttatggcgataatcggcaacatcaggatagcagctagtgacaaggatttttcaaacacatcatcatgcaacggccagcttattgtgtgataatgatgataaagaaaggatgtgaatgccatggctgaccaacaggaattagatgatttttttgcccacgccaaggctgctctagatttgcccgctgacacctatgaagatgcttaccaactcggcggtgcaaaatttgctgataaactcgctgcattggttaaaaccggcaagaaaaccgcaacttcaagcggctttgagctgtatactattgaacaggatccgctacccaacgccggcgtctataatattatcttgaatcgggcggataagcctgttgccttgactttcacggacaatgtttttgtgacgccatttatgaaagtgactgccgatattgctaaacgcgaaggagaagacgatcaatccttagctagttggcgtgaagtccatcaagcctttttcagtcgggaatatcaagcaaatggcattcaatttgatccagaatcatccatggtcgtagtcgaggaatttcatactgtgtacccagtcgttcaaacgaggtgaaagcaatgaatctcaagcatcgtacagcgagcacagaaaagaaagtcacgcaaaagctcgatgacatcccccatcccacacttgatgccacactctacttactcgttttcagcatcactgccatcggcggcctagtttcctatggcgcctatcagctctttaaaccggagcgaaagttagcccacaaagcaaaaacactcgttgatgaacatgaagatgaccaccaacacgaggcataaaaaaagcaggtcacaacggcctgctttttgcttgttttgaagaagaggtgggcaaatcaccaaggtctttgtttctatgaaaacagaactgcctatttaccttggctttcctcatcattcatcttcagaatactcataaacgcttcttgtggaacttccacagaccccactgatttcattcgcttcttaccagccttttgcttctctaaaagcttccgtttccgcgtgatgtcgccgccataacattttgcaagaacgtttttacggtaagccttcacagtgcttctggcaatgactttattgccaatcgcggcctgaatcggaatttcaaactgttgacgcggtatcgtggttttcagacgcgcaacaatggccttgccgcgttcgtaagcaaagtccttgtgcacgatggtactgagcgcatcgacaggatcgccattaagcaagatgtccatcttaaccagatcactttggcgatagccggtgatttcatagtccagactggcgtatcccttcgtgctgctcttgagatcatcgaagaagtcgtaaatgatttctgaaagcggcaagttgtaaatcacattcacccgatacttgtctaaataatccatcgtcacaaactcgccgcgcttacgttgcgataactccatgactggcccgacataatcattaggcaccatgattgaggctttgacatacggttcgcgaatttctttgatttcgctaacttctggcatgtcagctgggttgtcgatcgttttttcagtgccatcggtcatgatgatttcataatccacacttggcgcggtcatgatcaagtcaaggtcgtaatcgcgttctagtcgctcttggacgacatccatatgcagcaagcctaagaacccgcagcggaagccaaaaccaagcgcctgcgaagtttctggttcgaattccaaagccgcatcgttcaattgcagcttttcgagggcctcacgcaaatcgttaaacttggcattatcaactgggaaaagccctgaatacaccattggcgtgattttgcgatagcctttcagcggcttttctgctggccgatccgctaaggtcaccgtatcacccacacgagtatcctgaatggttttgatcgcggctgtgatatagccaacatctccgaccattagaaaatcacgtttgaccgctttaggcgacatcacgccgacttcggtcacttgaaattgcttgccattgctcatcagctgaatggtgtcgccgactttaacttggccttccttgacgcgcacatcaagcacaacgccacggtaatcgtcataaaccgagtcaaaaatcagtgcttgtaatggcgcattcaaatcgccagatggtgctggcacatcggtcacaatccgctcaagaatttcaggcacgcctaggccggttttaccactggccaaaatagcatcggaggcatccagcccgatcatctcttcaatttcctctttaacgacatctggctgggcactcggtaaatcaaccttgttaatgaccgggatgatttcaaggtcatcatcgatcgctaaatagacgttggctaatgtctgggcttcgacgccttgggtggcatccacgaccagcaaggccccttcacaggccgccagactgcggctgacttcatagctgaagtcaacatgtcccggtgtgtcaattagatgaaaaatataagtttcgccatttttagctttgtaatgcagttcaaccgcatttagtttaatggtaatgccacgttcacgttcaagtgccatatcgtctagcacctgcgcctgcatatcacgtttggcaatggtatcggtcaactccaaaatacgatcagcaagggtcgacttcccgtgatcaatgtgggcgatgatcgaaaaattgcggatatgcttttggcggtccagcatttcttcttgattcatgtttagtagtgcctactttctaagcgaatgtgatatgagttctattatagcagagcttggcgcagctcggtagaaacggacagctaaaggtagtgtcagtttgatcttgattccattctgtaacgattcaaacatgtccccatcaaaaaagcgatccatataggatcgctttttgcttacttaccgcctttaaaagcttccttaacccgatcgaacagcgtgccattgtgcggggtgacatcctcgccactagcggctgcgaactgcattaaggctgacttttgcttctcattcaaatgctttggcgtctgcacttcaacggtgacaatctgatcaccagtgccgttgccgcgtaagcgtggtgcccctttgccgcgaagtctgaacttcgtctggctttgggtgccagcaggaattttcaattcaactgcaccatgaacggtgtcgactttgatctcgtcacctaaggctgcctgggcaaagctcaacggaatggtcagatagatttctgaaccgtcacgttgatactttttgcttggtgcgactcggaaaacaatatagagatcaccataagggccgccgttggttccagcttcaccagcctgctgtagtcgcatttgctggccgtcttcaacaccagcaggtactttcacatcgatggtgtgacgttcctgttcgtggccagtgccatgacaagtcgggcacttttctttgatctccttacctgtaccgccgcagacatcgcaaacctgccgcgtcatcatggcgccaaatgcggtattgcgttgaacctgaatatacccactaccgtgacacttatgacaggtcacgggactggtgccaggtttagcgccgctgccattgcaggtgtgacaaacggcttcacgatcataggaaattttggtgtctttaccaaaaatagcttcctcaaacgttaggtccatgcggtattgcaaatcggctccttggcgcggagcggatggattagcctgcgcaccaccgccggcaccgccaaagaattgactgaagatatcgtcaaatccgccaaaaccgccttgtccgccgccaaagtcactaaatccgccttgaccagcaccagcgccgccaaacccttgcggaccgtcagcagaaccatactggtcataggccgcccgtttttggggatcagacaaaacctgataggcttcattaatgtctttgaacttctgctcagcccctggtgcatggttgagatccggatggtatttcttcgaaagcttgcggaacgctttacgaatggtgtcatcatcggcatctcggcttacaccgagtgtctcataataatctttctgatccgccatagttcctcctcgattcagatcatgactgaaaatgcctgttcagcatagcataattcaaacaaaaagccaaaaccgcgccgcggcttcggcttcttgctcatgatacaacatgttacttcttatcgtcgtcggaaacatccttgtagtcaccattaatggtgtcatcgtcagactttttatcatcgctgccttgagctgcgcctgcatcagttgctgcaccgctggctgggccgccttgcgcctgctgattcttctgggcattttcgtacaacttcacggtcatatcctgaaccagtttgctcaagtcatcccgtttttgcttcatgtcgtccaagttgttttcttgttgagccttcttcaaggcttcctgagcatccttgaccttcttgatgtcttcttcaggtaccttaccgtcaacatctttcaatgtcttatcggtttggaagagcagctgatcgacgtcattctttaagtcgacttcttctttacgcttttcgtcggcatcggcgttttcttcggcttccttcttcatccgttcaatttcttcatcggacaaaccgctagaactcttgatggtgatgttttgcgacttgccggtgccaagatccttcgcagaaacctgaacaatgccgttcttatcaatatcgaatttaacttcgatctgaggtacgccacgtggtgctggcggaatatccgtcaactcgaagcgaccaagtgtcttatcgtcagctgccattggccgttccccttgaagtacgtggatatcaacggctggttgactatctgctgcagtagagaagacttgactctttgaggttgggattgtggtattacgatcaatcagtttggtgaagacaccgcccatggtttcaatcccaagagacagcggcgttacatccaacagcacaacatccttgacatcaccagagatgaccccgccttgaatggcagcaccaagcgcaaccgcttcgtctgggttaatgctgtggtctgggtccttgccagtccactgtttaactgcttcctgaactgctggtgtccgagttgaaccaccatttaaaataaccttgtcgatgtcagcgttggtcaacttggcatccttcaaagcattttcgactgggatcttggtcttggcaaccaagtcagcggtcatttcgtcaaactgtgcccgcgtcaaggtacgttccaaatgcaacgggccattagggccagcagagataaatggcaagctgatctgtgtctgggtaaccccggacagatccttcttagccttttcagcggcatccttcagccgttgcatcgccattttatcattggacaaatcaatattgttgtctttcttaaattcagcaactaaccagtcgatgatcttgttatcaaaatcatcaccgcccaaatgggtatcaccattggtcgacagcacttcaaagaccccgtcgcctaattgcagaatggaaacatcaaatgtcccaccgccaaggtcataaaccagaatcttttcgtccttgtcgcctttgtccaagccataagccaaggcagaagcggttggttcgttgataatccgctgaacattcaaaccagcaatcttgccggcatccttggtggcctgccgttggctatcattaaagtaagccggtacggtaataacggcgtccttaactggttcaccaagataatcttcagagaacttcttgatgtattgcaaaatcatcgcagaaatttcctgaggagtgtattccttatcgccaaccttgactttgtagttagcttcacccatatggcgcttaatggaaacaatcgtgtctgggttagtgatcgcttggcgcttggccacttcaccgacttggatttcaccatctttaaacgcaacaacagatggcgtggtccgattgccttcagggttggtgataatttttggctgattaccttccagaaccgcaacagctgagttggtagtccctaaatcaataccaataactttactcatagtttataccttctttattttcagattaattattttgcaacgacaaccatagcaggacgcaacacacgatccttgaggtaataccccttttgcaatacctgcgcgactgtgtcagctggatgttgatcatccgctgcgaccgtttgaacggcttgctgggtattgggatcgaacttgtccccggcaccatcaatggcagtgatgccgttttccttcaaagcgcgttccagatgatcgtaaaccatttgaacacccttcttcagggaaactgcactgtcatctttggcctcggttgcaagcgcccgctcgagattatcaacaactggcaaaatggctttagccaacttttgcccatcatatttcaacagcttttgctgctctttctcgaagcgagcattcatattttgaatttctgcagcggcacgcaggtatttatcttcaaagtcgtcgcgttcttgcttcaactgctcgccgtcatgtttactgttcgaaagttgttcgttaagatccgcgatactttcttgtaaaatatcttcttttaacgaagtctctttcgtatcagcagacttttcagctttctttgcggcgtttgctgcatgctttgctttttgttctgccatggtatcctcctttaacgcgtttcctgacgtaaaagcctgtccataaggaacacatgcacaatgcccaaaaaagaccattgcatttgtgcgccgatttctgaacgtgtcagttcacgctattctttaaacgcatcagttggcttaaaaacaccaactgatgctatttgctaacatgattattgatcaaagttggcatagtagtctgtcaaccgtttagctagctcttcgcgaaaaacgtcgagcaagccgatcatcttggagtacggcatttgcgtcggtcccaagagggcgatcataccggtaccgtgaccaccaacatcataactagcagtgatcaagctgaggttcgctagatcaataggttttaactccggacccagtcgcacttgaaccggtgtttggcggatcgggccgcccagcaactcagtcagatcgccgtgatccgcatcgatcaacgacatgatctttttcagctcgtgaatatccgaatcgccaaggtaatccatcaagttcaaccgcccgccaacataaaaacgttcagaggcagctgactttaagacattgccaaaaatatcaaggaagccgtctgggctggtcaaatactgcattagcatggacgggacatccgtcctcagccgctgtgctacctgaaccaatggcaacccgaccagctgatcattcacaattctgatggctttttcaagttcatcggaagaaatggacggcgggacggtgaacacctgattttcgacattaccattattcgtgaccaaaatggccatgacttgatggttacctagtggtacgagtcggaacccagtgagcttaatattgttgacttccggaccgagactaatggcggtgtagctcgtcagatttgatagaatctgcgcgctttgtgccacaatttcgtccattttgctgtaacgctggccaagctcctgcttgatcgttgccaaatcatggcgagagacgcgcacgggttcaacaagatgatcaagatagtagcgatagccttgtgtcgaaggaactcgacctgaactgctatgggtcttggtgatcagaccggcatcttccagcgctgccatgtcgttgcggatcgtcgcagaactgacgtgaaccggcagctcttgcattaacgtctttgagcccaccggctggccactttcagtaaacaaccggatgatctcttttaagacgagcaattgccgtttcgtcaacattttctcacctcacctttagcactcgttttatatgagtgctaatacaatgaataatataccaagcgaggttagcaaagtcaaggtacgattgctagattgtgaacgtttctagtgaaaattatggcaagtgcattttaacaacacagccgtttcttttagcacttaaacaagcggctcatcaatcaagaaacgttgaaaaacttcgttgccaaggaacttgcctttgttggtcaggcgaatgtagccatcttggcgcacaaccaaaccttgactgaccagttccggcacagtttcaccataaatggcgtcaactgtcatgtggtagcgatcataaaaccgcgcttcactgaccccctgcatcgtccgcaagcctagaaacatttcttcttcgatctgttctgactgtggcaccaaatgatgttcaaggaccggcaagtggtcagcatgtaatggtgttaaatactgcttaataggaccatagttgtggtagcgatcacgaccaagatacccaaacgcgccagcaccgaagccaaagtacttgtcattgcgccaataaagcaagttatgctcacactggtacccgtcctttgcaaaattactaatttcatattgatgtcggccatgtgcttccatgagatcgatcgcatcttgatacatatcggcctcgacgtcttgggtcggcaagcgcaacttgccctgtcgcatcagattatagaagatcgttttacgttccaaaattagggaatacgttgagtaatgcggcagatccagtgccaacgccttttgcaaactggtcagaaagtcatcgcggctttgatcaggtagtcgaaaaatcaaatcaatcgaaatattatcaaacccgacttgacgggcgttagcaatggcagtgtaaacatcttttgctcgatgtatccggccgattcggcgtaatacatcatcattaaacgattgcacgccaatcgacaaacggttgacaccataatcatgtagcacttgcaatttttcggtcgtgagcaagtcattggggttggcttcaaaagtaaactccccttgatcaaaatgtaggatatcatgaataccctgacacaatgtagccaattgtgtcggtgtcagcgtgctgggcgtgccaccaccaacataaaccgtctgaattttttcttcaggatgttcagccatcaccatccgcatttcttttagcagcatggccacataatcatcaactggctggccttcgatgaaaactttgttgaaatcgcagtagtaacaaatatgttcacaaaatggtatatgaagataagcacctgccatattaacccttctttgcggcaaaataatctcggacggcagtttcatcttttttcaattgatcaatcagggcatcagcaccagcaaatttcacttcaccgcgtaaatagtgataccagcgaacttgaacggtttcgccataaatcatttgattaaaatcaagtaaattaatctcaagtgtcacgtctcgatcggcgccaaacgtgacattacggccaatggaggccatgcctaaataccaagtggtgccaactttgaccttcactgcataaataccaatgcctggtaatcgctgttggccaagtgtctccaaattgattgttgggaagccaagtaaacggccacgcgcctcaccatgaaccaccttaccagcagttgtataggtataacccagaaaatcattggccgtatcaatatcactggaatcaagtgcatgccggattcgggttgaactgaccttttgaccattctcagcgagttcggggacgctgatgacatcaaaccggccacaagcatattttggcaacaaagccatagatgcaacatcccgcttgccataagtatagtcaaaacctgcaactaccgtatccgccttcagaccgaccaaatactgatcgacaaaagcttgcggcgtcagcgcagcgaaatctggggtaaagtgaaccacatacaaatagtccacgcccagtgactgcataattttgattttctcttcacgagtggataaataccgaatatcggtttcggaaaccccacgataaacgacggctggatgaatattgaacgtcatcaccgccaacggtatcttttttgctaaagcgatcttcttgccggttttaatcaccgcttgatggccgcgatggacgccgtcaaagaagcccaaggtcaagacgatgggctgtgacggggccgcggacacctgcaatggcggctgaatatcaattgttttcataaattttcacacattcttttcattagctaaaaacattaaatctggccgatactgatcgtcttctcggcgatagatagccttaagaacgcctgcaaaatgcagacgaacgcgcggagtctgctgatcgagcgataaaaagcggccatgactgattgcctcaaattgttctacggtcaaatcaacttgaggcagatcggcaaaagcaatatcaatcggttgaatcacatcggctaaagtacctgccgcggcatgcgccttcaattgctcaatgctaaccgcctgcttcaacgtaaacccgccgctttttactcgcgtcaattgactcatcaccgcagcaactcccagcgttttgccaacatccactgctagtgttctaatgtaggttcccttagaaacatggacctcaaaccgaaaacgctgggtgccatcagtggctgaaaaaaccggttcatcggtacgtgtaaactgtgacaccgtggcctgtcgttctggccgcttcacagtttcaccggcgcgcgcatattcgtaaagccggcgaccattgactttgaccgccgaaaacatcggcggaatctgtgtgatgtttcctgtccacgcagtcaatgcagcatccaactgatcagctgtaaacggctgcgttaaaggcgttttatcaacaacttccccatccaaatcctcggttgtcgtcgcaaaacctaacgtgatttctccggtgtagactttcccactggccattaattgcggcaccgctttagtgcctgcaccaatcgccagcggcagcacgccgtccacattaggatcaagggtaccggaatggccaatttttttgataccaagaatcttgcgggcatgatacaccgcatcagcactggtcatgccagtgggtttatataacggcaaaatcccgttcatggcagttcctttcatggttttgattttttatacatactatgatgatgtttttcatgctcgacatgtcgccagccggcccagatgaaaacaagcaccactaggaccgaaaaaagccagtctggcgttttcacatcaatcattggcagactgagacctagcttaatggcaatgagacctacaagaatataagctgcggtttcaagttccggaacacgatcaataaaggtggtgatgacctgcgccaccagccgcatagcaaagataccgagacaaccgccaatcaaaacaatcaccggattgctggacactgccaaggccgccaaaattgaatcaaccgaaaatacgatatcgagactctcaatttgaatgactgtcccccaaagcccgtgaggtcgtttcccatgcgtccctctctgattttttggatggcgcacttcataaaaataactcgcactcatccagacaagatacgccgcaccaatcgctttgatcggccagaattgcaataagtaagtacctagtccgatagcaatgaagcggaatatgtatgcaccacccataccgtacatcagagctttttttcgttctgattcgaccttgagctgctcggtttgtgcagcgagcacgacagcgttgtcgactgatagcatgcattctagcaagatcaagctgaaaatggtcacgaggccgctaacagaaaatgccagttgccaattatgcgctgagaagaatggtccgtataaggcacctagtaacttgatcgtgatccttcctttctcaatgattattattataccgtgcaagcttgaaaacctaaagctgttggtcggtaaagtatgggtttgaatttcttactgatatcccagttgaggtagagtcgataattggggtggcgtccgaaaaactagaattggagacatctttgaactctggcgtacaaaaccaagttcaaagtctggcttttaagttgggacttcaatcgaaactatgcgatagacaaatacactactgcagaggaagatttgctttttcgcatggatagtttttatcgggatttaaagagcccagtgccaaggcggagcaatcgtaggccagatggggctcagccgtgcaaacaacacagcgaccgggctttgtcgctgatgttgttaggcgacttcgagaccgcgggctttgcgggctcgaagcgccgtctccgctctagctacgcgtcgccagccccagctggccggagattgcggagtttggcacggcaagggtcttttagcctagatccttaacccagaaaaaaagacctgaccactagcagcagtcagatccttcttttaaatggtgcttattcaagattcttccgtcgtacttcattgatcagttgatcaatgcgtgcgccgtattgaacggatttgtcttgagcaaactcgatttccggtactttgaataaccggatacgctgcccgacttcgcggcgaatgagtccactggccttgtccagaccggtttgggctgcttcgactttgtcaggtgcatcatcgagaatgctgtagaaaatggtggcatgttgcagatcaccggtcagtttgactccggtaatcgtcacgcctttaacccgcggatcgttgacatctttcaacaagatatcgtcaacttcacgttggatctgagtctcaactcgaccgatacgatgtttcatatctgcctacctccttcaaaacagtcggtatcattaaatcctgagatacgtttgggttagttacttcactggaacctgttccattgtgaaggcttcaatttgatcatcgactttaatgtcgttgtagttctcaatggtcaggccaagttcaaagccttgacggacttccttgacatcgtctttaaagcgacgcagggagccgagtttaccttcgtacttgacgatgccatcgcgaacgagacggacaccagcgtcgcgtgtaatatagccggaatcgacataaccaccgacaacggtaccaaccttagaaaccggaattgtttcgcgaacagtcactgttccgatcaccttttcttcataggttggttccagcatacccttcatcgcagcttcgacttcttcgatcgccttgtaaatgacactgtgcaaccgaatatcaacatcgtcttgttctgcttgggcttttgccagcgcagttgggcgaacgttaaagccaatgatgatcgcgttacttgcagctgcaagggtaacgtcactttcgttaatcgcgccaacggcctgatgaataatattcacccgaacacccttaacttcgattttctcaagactgccagccaaggcttcaactgagccttgcacatcggccttgatgatgacgtcaacttctttcagctgaccttccttcattgtttcaaaaagattatccaacgtgacatggttggtgttcttacgttcttcttcctgtgcccgcttggcccgttcttcaccagcagcacgcgcggtgcgttcatcggcaaagacaacaaacttgtcagccgattgtggcacatcgttgataccagtgatttcaacaggcattgatggcaaagcatctttgacccgccggccatgatcattagtcatggcacggacgcggccgaaagtattcccgacaacgattggatcacctgtatgcagcgtaccttgttgaaccagtacggtagcaacaggacccttacccttatccaaacgtgcttcgatcacagtaccaaccgctttttgatcagggttagctttgagttcgagcacatcggcttcaagtaaaatcatttccaacaattcatcgatgttcttgccaaatttagctgagattttgacgaaaatcgtgtcgccgccccagtcttcaggaatcaacccgtattccgtcaattgttccatgacgtggtctggattagcgcctggcttatcgatcttgttgactgcaacgatgatcggtgccttggctgcctgcgcatgatgaatcgcttcaatcgtctgcggcatcacaccatcatcagcggcaaccaccagcacaacaatgtcggtgatgtccgcaccacgcgcccgcatgttagtgaaggccgcatgcccaggtgtatccaagaacgtaattaaccgatcacgcagtttaacttgataagcaccgatatgctgggtaatcccgccggcttcgccttcagtcacatgtgtgtgacgcagcttatcgagcaaggttgtcttcccatgatcaacgtgacccatgatagtaacaactggcggccgtggctgtaagttgtcttggttcttgttttcttcttcgaacactttgtccaagtcggaaatatcttcgtgaaccttttcttgggcgtcaatcccgtaatcggtagccaacaattcgatggtatctttgtcgaggctttggttttggttaaccatcacacccaacatgaagagcttcttaatcaattcagctggttcgcgatgcaaaatcttaccaagatcctgcgcattcatcccaacttcataaatcagtgtttctggtaatggccgctctttacgctgcggcatttccttcttcggtgcgctttgttgacggcgcttgttcttcttgttgcgccggttgttgcggttaaacccgttacgattcccataactgttgctgcggccaaaattactgttcccgccgccacgccggctattgcgattgtcttggctgccggcacttgccggttttggtgctgccgccgctggaactggagccggtttcgtaaagcgttgattggttgttgcagctggctgctcagtgcgcggccgttccgtccgaggttgctcagaacgtttactcgctgcatttgccggtttgaccgcttcctgacgttttggctgctgacgttcagacgctggtttaacaaacttgccaccgttgcctgccacaggacggggattgccattagctgccgtgggacggccagcacgcggcattggccctgtgacgcgttggttatcgaaccgacgattacggtcattacggttacgttcgttagaccgattattgttaccggaacgattagcattgttcgcagaacggttgttattattgttgtttgagcgatttgaattccggccattagccgtattgttagcgctggctgtattgccgccacgattgtgattcgtgttggtatgcgctgtttgtgtgctgcgtggtcgcaaaattgttgacttgctcaagatgattttgccgtcagaggtcttatttgaccgcgccggcttgttttcttgcttagcagcaggttttgcgtttttttgcgaatgctcagcagcatcagcatgatcgtttgacttggcactggcagcgactggcttcttagcagcctctttgtgtgccgctgaactcgtcttggctgctttagcaggtgtctttgctgcctgtgatgacggtgctttgccagctgactgcttgcttaacatacctttgatcttagcttcctgatcttgatcgatcgaggacatgtgattttttacttcgatacccaagttcttcgcgatatcgatgacgtctttattatcgacgtgcatttctttggcaaattcataaacgcgttttttgcccatttcttcacgctccctgcaatttaggtgagcagctgttgcatcttcttagcgaagcccgcatccacaacggcaatgatcgagcgatcactgccgatggcctgcgaaagttccattttggaaaactctgtaaccaaaggaacttcataatagctgcttttatccgaaaacttcttgcgggtgttggcactagcatcattggcaacataaaccaatttagcttcacgcgagcgaatcgctcctaagaccagattatctccggtgactaagcgactggcgcggcgggccaaacccaataaattcaatacggcttgtttttgcatcgtcacttgccgaatagttcttgacgagccttttgatgatcgacatacgcgaataggtcatcataaaaggttggttcaatcgtgattccaaatgctgcgtcaatcagcttcttaccctttgctgctttcacagcggctggatcaagtgccacataggcaccgcgaccagcagctttgccggtaggatcgatggcgacaacattttctttgttcttcacgatgcgaaccagttcttttttcggcatcatctgattgcttagcaagtccttgcgcattggaatcttacgctttttcatggctcgcctccttaagcttgcgccggatgatcggttgcactcggcgttacaggcgcttgatcagctgaatctggtgcatctgaggcggttttggcgtcgtcggcatcatctgctgcagcggcatcactgtcaggcgttgtctcagcgtcagttgctgcatctgcgttgtcgttagtttcagcagccgcttcagcctctgcttcaggcaattcatcatcatcaacgaattcaacttcagattcaggcttgatgtcaatcttatagccggtcagcttggcagcaagtcgcgcattttgcccctttttaccaattgccaaggacaactggtaatccggcacaatcacagtagcggaacgatcattggcctcatcattgaattgaaccgcgataacctgagccggattcaaagcgttggcaatgtaatccgctgggtcttcctcccattgcacaacatccatgttctcacctgaaagctcgttaacgacggcttgaacgcgcgcaccacgcggaccaacagtcgtgccgacagcatcaacagcgtcattggttgatcgcacagcgattttagtccgatcgcctgcttcacgagcaatgttgacaatttctaccgtgccgtcaaaaatttctggcacttcctgttcaaacaaccgcttaaccagacccggatgtgttcgactaacgaaaacttgcggacccttgctcgtgttttcaaccttggtcacataaaccttgatgcgatcatgggcttcatacttctcattaggcatctgatcttgacggcctaagaccgcttcgattttacccaagttgacgtagatgaaccgattatctcggcgctcaacgaccccttgaagaatctcatcttcatactgtgaatattcgtcataaacaatactgcgttcagcttcacgaacccgctgcataataacctgcttagcagtttgtgcagcgatgcgcccgaagtcttttggtgtgacctcaaatttgatttggtcaccgatttcataagccttgttaatcgccagcgcttctttcaagctgacttccagccgtgaatcgaaaacttcgtcagtaacttccttcaccgcataaatgtgaatgtcaccttgcttaggatcaaattcgacgtccacattttgcgcttggttgtaattgcgcttgtaagcagaaaccaaagcggcttccaaagcttcaatcacgacctcttttttgacacccttttcttgctcaagagcgtcaagtgcttggatcatttcctttgacatgcttttcttacctccactagaactcgatcgccaaccgcgctgaagcgatcaactgccggtcaatgacctgatcgaacttgcggctcttatctttgaccgtcaatgtcaactggtcaggcaatagctcctttaaagtcccttcaaaaaccttcttgccgtccagtttcttgaataaagagacatggatatagtcgccaactgcttgttcataatcagtttcatgtttcaagggccgttctgcaccaggacttgaaacctcaaggaaatattgctgcgggattggatcgggatccatggcatctagcttttctgacaaggcttcactgaccatcacacattcgtccagtgtaatgccgcctgtcttgtcaatatacacacgcaggtaccacccgccgccttccttcacaaactcgacatccgtgaggtaaaaatgatggtcgtccaaaatcggtttgaccaaagcggtcacggtttcaacaaccgattgcgtactcaagccaccgcctcctttactttctcattcaagactaacacttctgacgtctccagatgcgaacatggtgacgttcgccaataaaaagagtgagcatcgctgctcactcactgccagaaccttacattactattgatacaataccatagattgttactacttgcaaactagcagacctttgtgctagtaagcctgtaagccaattcatcgcattttttctaaacattcatgacagtttgcatgaaaccgcattaagcctagaataaaccgtcaaatagcgataattggttttcgtctggcaagtcatccaagacatggtttgttgtcatataatcaatcaacgttttcgaaaccttaccacgattagccagatcttccttggacaggaatggtttttcttcacgagcggccacgatttgcttggcaacgttatcgcccaggcccggaacagcacggaatggtgccagaatcgtgtgatcatcctgaatcaagaaattgtgcgaatccgacttcgtgacatcaatcattttaatcttaaagccgcgttcgagacattcattggcgatttccaaaaccgtcagcaactgcttttccttggtagaggcatccatgcccttatcggtaatctccttcatggccgctttgactgcttccttgccatgactcatggcggcaagatcaaagtcttcagctcgaaccgagaaatatgccgtgtaatagatcaacgggtaatggaccttgaaccaagcaattcgtagcgccattaagatataggcggtcgcatgtgctttcggaaacatgtacttgatctttaagcaggactcgatataccaatcaggcacgttctcgttttcacgcattgccttttgccaatcatctggaataccgcgacctttacgcacatgttccatgatgttaaaggccattgaatcttccatgccccagtgaatcaagtccatcataatgttgtcacgacaaccaatgacttctttaagcgtgacaatgccttgcttaatcagttcttcagcgttacctaaccaaacatcggtcccgtgagacaaaccggaaatctgtaacagttcgctgaaggttgttggcttggtttcctcaagcattccgcgaacaaaacgcgtcccaaattctggaatgcctaacgtccccattttcgagttaatctgttccggcgtgacacccagactcttggtgccggaaaaaagcgccatgacgccaggatcgtccgttggaattgattttggctcaaccccggacaaatcttgcagcatccggatcatcgtcgggtcatcatgccccagcacgtccattttcaaaatattgtcatggatggaatggaaatcaaagtgcgtggtcatccaggcagcattttgatcatcagctgggtactgaatcggtgtgaaatcataaatatccatgtcagcgggcacgatcaaaatacctgccgggtgttgcccagtggtacgtttaacccccgtgtcaccttgcgccagccgatcaatctcggcaccgcgcagttgctgtcccgtgtcacgttcatatgctttaacataaccatacgccgttttgtctgcaaccgtgccaatggtcccagcacggaaactatgatcctcaccgaacatgactttgatatagttatgtgcaattggctgatagtcacccgaaaaattcagatcaatatccggcactttatcaccgtggaagcctaagaaagtttcaaacggaatatcgtggccatctttatgcaaatcagcgccgcatttagggcattgtttatctggcaaatcaaaaccggacccgatttcgccatgagtgaagaattcgctgtattgacagttaggacaacgataatgcggcggcagaggattaacctcagtaatgccggccatcgttgcggctaaactggacccaactgatcctcgagagccaaccaagtatccgtctttattggacttcaaaaccagccgttgcgcgatgttgtaaataacagagaacccgttaccgatgatactttttagttctttatcgagtcgctgcgccacaatgtctggcaaaggatcgccatacaattcatgcgccgtggtcatcacgtcatgtttcagattttcttccaccccaggtacttcaggtgtgtaaagcttatccttcaccggcgtaatatcatcgtcaacccagttggcaatcaagttagaattatcaactaccagctcgtgggccttctcttccccaagccaactaaaatcggtcagcatctcacttgtcgaacgaaaatgcacatctggcaaactgtggcgattgagcggattggctccgccttgactatgaatcagaatctgtcgataaatcgcgtcatgttgatccaaataatgggcgtcgcctgtcgctacgactggtttttccagttccgatccgattttgatgattttttgaataatatcttttagatgtgcctcgcctttgatcaaaccagcctcgatcaaaggttgatagacaggtaatggttgcacttctagataatcataaaatgacgctttggcgcgggcctccgcttcgcctttttgcatcattgctgtgaaaacttcgccgttggaacaagccgaaccgactaacaagccttcacgcagtttttgcagctgactgcgtggcacccgtggcacccgatagaagtacttaacattagacaacgatactaatttgaaaaggtttttcaatcccgcttgtgttttcgcaaaaacaatcgcgtgacttggccgggcagctttataggcatcccccgccccaacccgatcattcaactgattgagggtcgtcatgccatacatcttggccgcttctttttctaaagcataaagcagataaccagttgcctcggcatcggcattagcgcgatgatgatgttctaggctgactttgtactgcttcgccaaggtatcgagtttgtgattcttccgttctggatgcagcatccgcgacaattccaaggtatcgatgaccggattgtcaatatctgccaatccatgccgctcgtaaccattatccaaaaagccaacatcgaaagtcacattatgacccaccataatggcaccgtcgcaaaactgctgaaacaatttgaaaacatcgacttcagacttcgatccatgcaccatgtcatcagtgatatgtgtcaaattaattgtcagttcagaaagtgggaaacccggatcgatcatttcttcgaattgatcaatcactttgccgtctttcattttgacggcagccaattcaatcactttgtcgtaaaccgcagataagccagtggtttcaacgtcaaaaaccacatattcagcgctggctaaatcacgcggctcatctgctcggtaagcaaccggcgtgccatcatcaactaagtttatctcgacgccataaagcatttttaaaccggctttgacagcggctgaatgcgcctctggataagcctgcaaacctgcatggtcagtgacagcaatcgccttatgcccccactctttagcccgcttcacatagtcgctaattggattcatagcgtccatttgactcatattggtgtgcagatgtaattcaacacgtttctcaccttcagcatcatcggttgggtccggatgggagacagtttgaatatcctgtgcattaatcgtcagctcacgggaatagttgtcctcttgaacactgcctcgcacgcgtagccactgacctttttgaatgcgcgcaaacatggcttcatcttctggaccattgctgaatttttttgcaatgaagctggagctatagtcagtcactttgaaaattagtaactgccgcttagatcgcagttcccgaacctcaacatcaaaaacatagccttcaaccgtcactgaacgttcctcttgcgtgatggtcaccatttgttgcggggcatcggtcattttcatctgccgccccatttgaactgggccgtcagtttgaacttgtttttgtttagccgcttgctgcttcactacttctgcagcagccttggccattttagcggtttcttcagctctttgagcctgaaaagccgccatcgattgggctgcttgttcctcatcaacttcggcttgcatccgtaagccagagaagccaacctgacgataagtttcttcgatcttaccgagcccttgctgaatcaagtattgccgaatttgctcattttcggttttgatcacagcacgatcattctcaagtgttggcacttgtttttcacataactcgcgaacaattcctgtcccaatttcggcatgggtcacgacgtactgccaatattgagctaataactcgtcagtaatggttggctgggttaccaccaccgataaatcagtcgcagcaatctgttgaaacactaacggcaacttggtcgcaattgcattgaaagtctgaaatggcaggatcgcgtcaaaccccaaagtgaaatcataacgccgagattgttcatgaatggtcacgttttgtaccgtgccgctggtcaacgaaggatcttgtcggacatctgccgccaagtcgagttgatccaataatttttcaaacatctcatgttgggataaagccaaattgtgcacccctcttagatggcaggaaacgaccaaagcagctgcttcagtcgtctcctcagtctatcaattatcttgttcttgcttattcagctgacccatcagaatcttgatcgagctgatcaattcttcttttttaacttcgattgtctcgccggttttacgcagtttcagttcaacaatctcgtcaaccgcttttttaccgaccgtgacacgtaatggtacaccaatcaaatcagaatctgcgaacttaacccctgggcgttcgttacgatcatcaaccaaaacgctgtaacctgcaacttctagcattgtttcaatcgaagccgtcagtgacttttgttcttcgcgcttcagattaactggaatgagatgaatatcaaacggggcaatcgtagttggccaaactagcccatgttcatctgcttgctgttccgcaatcgcagaaagcagacgggaaacgccaatcccatatgaacccatgatgatcggttgactgcggccattctcgtcaagaaaattagctcccatagtttccgtgtatcgggttcctaacttgaagatgtggccaatttcaatcccgcgtgtaaacttcaggacaccttggccatctggagaaacttcgccttcagtcacaaatcgaatatcggcataggtttccggggtaacatcacgatcaaaattgacgttaagtaaatgcgagtgcactttattagcgccggcgacaagattagtcaggtcacttagactattgtcggcaatgatccgcacatccttatcgacattcaccggcccaatattaccgacttctgcgtgcatcacggtctgcacttgttcaggagtcgccatatcaagaaagtcagcattcaacaaattctttaacttagtcggattgacttcatagtcaccacgaaccaaggccaataccggtgcgccatcagccatgaaaaggacagctttgatcaatttcttttccggtaccttcaagaattccgcgacttcagcgatcgttttggcatccttagtatcaacaggttcgagcgctgcctgttcttcgaccccttgttttggcaacgccatgctggttgccatttcaaggttcgctgcatagtcagaactatctgaataaacaatcgtatcttcaccaatatcagcaatcgcggaaaattcttttgaatccttaccacccatggcaccgccgtcaccgatgatcgaccgatagcgcaagcctaaccgatcaaagatattggtataagcatgttccatctgccgataaatggtatccaaatcctggtcattactagtaaaggaataagcatcttgcatgatgaattcccgaccacgtaaaacaccataacgcggacgatcttcatcacgaaacttatcctgaatttgatacaacaccaatggcatccgcttgtaggattttaattcattacggaccaaatcggtgaaggtttcttcgtgcgtcgggcctaagatcattttccggtcctgacgattcttcaatttaaataaattaggaccgtaagtttcataacgtccggattcttcccataattcagctggcaagagaacaggcattttcattttaacagcatcgattttggtcatttcatcgtcaataatggcttcaatccgtgctaaaacgcgttccgcaagtggtaaataagcataaacgcctgcttgaatctgacgcacaaagccagaccgcaacatcatcttatgcgacttggcctccgctgagctcggtacttctttttctgtgggaataaacatccgtgattgtttcatgtcagcctccaaagctagaatattttaaaagtagcgcatgatatcgttaattgtgaccgctagcattaatagaaccatcaggcccaagccaatcatggtcacaacgccttccgtttccggttttaatggcttacggcgaataatttcgatcaggttcaaaagaattttaccaccatcaagcactggaatcggcaacaaattggtaatccctaagccgagactcaagtaacccataaagaagagtaatccttgaataccgcctttggcactttgactcgtcatggtataaataccaaccgggccagccagtttattgagtgaaaaaccgccggtcaccatggatttgagcacgtcccaagtgcggacagccaaattccaagtttgagaaaaaccaaaaggaatggcatttgctggggacttatcgacgtgtgcttcaaccccgatcttgccttctttattcggcttgatcacgatgttcttgcttttaccgttttccttcacggtaaatgtcactgatttaccggcatttttactgacgatctttgaaagatccgtgaatgatgacattttttgaccgtcaatcgtttgcaccgtcgcattggacttaagaccagcttctgcggctggataacctggcacaactgttccgatttggttggtattgagcacctgaacaccaaaaaacagaccgtaaataataaaagctagaatcgcgagtaagaagttattcatcggaccggcgaagttgaccaataaccggcgccaaaccggggcgttttgaaactgaacgtcttctggcgcgatctgaacctcggttccgtcttcttcaatgatcgtcgcatcgtggtcaacctgccaagtttgcaaggctgtttcatccccgtttggataaccttcaatcaccagatccttaactaaatcgacgcgactcacttgaaccggcattccgccggccaaagtcgttttgtcactggcattaatccggacaaccttgccttgatcgttaagaatcaggctcagcatcgtcccgggcttaatctcgtcctcctcatcttgccagccagccatgcggacgtatccgccaagtggtagcaaccgcagcgtgtaggtcgtattgttcttgtgcgacgcccacagcttcgggcccataccgatcgaaaattcccggactagaatgccgctgcgttttgcaaagtaaaaatggccaaactcgtgaactaccacaagaatgcagaagataacgataaaggcgatgatagtggtcataaaatctccttaatggttagacaatgccaaacagatgcagcatcggcaaaaccagcaacaaactgtcaaaacggtcgagaatcccaccgtgccctggaagaatcttgccggaatctttgacgccatagaagcgtttcaaagcagattcgattagatccccaatctgaccgataacggacaaaaatagggcgatccccatcatcggccagaaggtatagtactgcgggaagaacatcagatagatggcggcagtgatcaacgccagtgcaatcccgccaagactgccttcgatggttttattaggactgatagccggccacaacttatgacggcccaacttacggccaatcatataagccccagtgtccgtcagccacacaatcagcaaagcaaacatcaaggtgtccaagccagcatcattacgaacactaatcagataatgaaaaccggtgccaatataaaagaaggacaatactgacacaccaatgtcgtcaaaggtagttttattcttggtcgtgacggtcaggaatagcaacagcgctaccgcaatatatattaaatcgattcgtccaagaaaagcaggcagccagcggaaaaaactgttaggcagaacaaccaccagcacaccaagagcagcgattagataatcagccgaaaccagaattcgtttccgcatgataaacacttctgacaaagcgatcactgctaaaactgcaccggcaatatcaatccaaccgccaccagcaatcaaaatcggtataaagatagccaaggcaacgactgccgtaatgacccgttgtttcatcgtaataaatcctccattaccaaaaaatagctgttttatttttttaacccgccaaatcggcgatcccgtgcctgatattcagcaatcgctgcttctagagctgcaggcgaaaagtctggccaataatcatccacgaataccaactcactgtaagcaatctgccaaagcaagaaatttgaaattcgcagttcgccgctggtgcgaatcaataagtccggatcagctaggtcgccaagaaatccggtcatcaacgcattggcaaagtgacggtcatcaatatcatccggagataactcgccttcctgaacttgtttagcgagcttttgtgctgcatggacaagctcgtcacgtccgccataattcaatgcaaagttaagaatcatgccggtattattggcggtgtcagccatggctttttcacttgcttgacgcgtttgcggtggcaagtcgtccagttcgcccatcacctcaactttaacattctccttgatcaagtcaggcatgaagtcattgaaaaaatcaaccgggaggcgcatgaggtaattgacctctgaacccggccgcttccagttttccgttgaaaaagcatacaaggtcaaaactttaacccctaagcgactggcagctttggtgatcgttttgacattatgcatgccttgtttatgaccggcaacacgcggaaaaaagcggcgtttcgcccaccggccattgccgtccatgatgatcgcaatatgagccggaattcgcgcgggatcaagtttaactttagaagccttggatgtggccaaaatcggtgcctcctcataacgtcgatggtgtccttgcaccaaatgtctttaacgattgtagcagaaaaagaggcagagcgcgaactagcgcgggtataagtggggatattttattagtaacacggatttggacaacaggtgccattagggtataggaaaagggtgagccataatttcctcgcaaaacttgtgaccattgaatgccgattaatcgtcggaaggttctaggcataaaatatgcttgccgtgccaaactccgcaatctccggccagctggggtggcgacgcggagctagagcggagacggcgcttcgagcccaaaaaccggtctcgaagtcgcctaacaacatcagctccacagcccgtcgctgtgctgtttgcacggctgagccccatctggcctacgattgctccgccttggcactacagtctttaaaatcgcagtaaatatttcatgagaaaccaaaaaggaacaatttttcaaatcgaaaattgttcctttttattgactgactgagaattatgtcccagcctttttgttggccgctgaaattaaacttcagtaatttctttttctttagctgcagcgatttcatcgatgcgcttggtagcgtcatcagtagccttttgcatgtctttttctaagcgatgcaagtcgtcttcggtgatgtcgccgtctttttcttggcgcttgagtttgtcgagaccttcacggcgaatgttgcggatcgcgattttggcgctttcagagtatttgccgacttctttggcaatttctttacgccgttcgccggttaattgtggaatgaccaaacgaatgacatcgccatcgtttgctgggttgatgcctagatcactggcattaagcgcggtttcgatgttctttaatgaggacttgtcatatgggctcacttgcagaacacgcggctctggaatcgtaatggcggccatttggttgagcggtgtgggtgcaccataatattccaccgtaatctgattcaacagactggcgtttgctcggcctgctcgaatattgccgagttcgcgttgcaacgattcttcagttttgcccatatttacttttgcttgatcaatgatttgatttgccattagcttctcccttcgattgttgtgccaatcttctggccttcaaccacgcgtttgatgttgcctggctcattgaggttaaagacgaccaaatcgatgtcgttgtccatggacaaggtgctggctgttgagtccatgactttgagatccttattgataatgtccatgtgggtcagactttcgtacttcactgcatgcgtatccttattcggatcagcagagtaaaccccatcaacattgtttttcgccatcagaatgacatcagcgccaatttctgcggcgcgtaaggcagcggttgtgtccgtgctaaagtacggattcccggtaccaccagcaaaaataaccacgcgacctttttctagatgacggattgccttgcgccgaatatatggttcagcaatttgccgcatttcaatggatgtttgaacgcgagtcggaactccttgactttccaagttgtcctgcaatgctaatgcattcatgaccgttgccaacatgcccatgtaatcggcctgcgcacgttccattcccatttcggcgcctgtttcgccgcgccagatgttgccgccgccacaaacaatggcaatttgaaccccaagttcgtgcacttctttaatttgctttgcgatcgtcgcaatgaccggtggcttgatgccgaagccagcctcacctgccagcgcttcaccgctgatttttaatacgatccggttatatttgaccatgtatcctatacctccgttggttgctggcactattttaccatagtcgcagggtttctgcggaaagaagctgatttgaaattgagaattgcggaccgttattttccctcaccacggatcagggtaccccaaaaacacgcagtcacacggtgtatagcgcggaaaagaacggacgtttttaatttttcaagataagtaaaaagggacgctgccgagttgacagtgtcccttcaagcaattaacccttaatctgatccatcacttcatcagcaaagttttcttgtttcttttcaataccttcgccgacttcataacgaacgaagcccttcaccttgccgccttttgcagcaacgtacttagcaacggtttggtcaggatccttgacgaattcttggtccacaagggaaatttcgccgagccacttgttaacacggccttcaacgatacgtggcacgatcttttctggcttgccttcgtttttggtttcttctgtaaagatatcggtttgatgcttcaattcttctgccggtaccttggtccgatccaaatattcaggattgatggcagcaacatgcatcgcgacatctttggcagtgtcgtcatctgcgccttcgataacggtcaaggctgcgatttggccaccattgtgcagatacttgccaaagtgttcgttgtctgtcttttcaacaacttggaagcgacgcaggctgatcttttcgccgataactgtggttaaggcaattgcaccttcgtcaactgtctggccatcactcatcttggttgccttagcagcttcaaggtcagctggcttattagccgcaatcgctgcagcaacattattaacgtagtccttgaactgatcattagaagcaacaaagtctgtttcggagttaacttcgataattgcagcggtattaccgttaaccgcaatttcggctaaaccttcagcggcaatattgccgctctttttagcagccttggccaagcccttttcacgcaaaacatcaatagctttgtccatatcgccatcagccgcaaccaatgcctttttagcatccatcatgccgacttgtgtccgatcgcgtaattccttaacttgtgcagcagtaatttgagccatggatctgatcctccttgatttaaaaaaggctgcctgcagatcttgcagtatgcgaaaccctcagacagcctattgtttaattaattattttgcacttttgttgtcgccttcaacggcttccacgatatcttccatggaatcagcctttttgtcggcagctacttgttgttcctgagcgtcgtcttgatcttcaccctgattgccttctatgatagcatctgccatcttagaagtaatcagacgaacggcacggatagcatcgtcgttagaaggaatgatcacgtcaatgtcgtcagggtcggtgttagtatcaaccatcgcaacgatcggaatgttcagtttttgtgcttcctgaacagcaatcttttccttgcgtgggtcaacgatgaacaacacgtctggaatgcgaggcatgtcttcgataccgcccaagaacttctcaagcttatcttgttgcttcttaagaagagaaacttccttcttaggaagaacatcaaaggtgccatctgtggccatcttcttgatatccttgagacgcttgatccgagtctggatcgtgttccagttagtcaaagtaccacccaaccaacgatggttgacatagtattgaccggcacgagttgcttcttcagcaattgcgtcttgggcctgtttcttggtcccaacgaacaagaagacaccaccgttttgagcttcttctttaacaaaattgtaagcgtcgtcgatcatcttaacggtcttttgcagatcgatgatgtagatgccattacgttccgtaaagatatacggcttcatcttagggttccaacgacgggtctgatgaccaaaatgtacaccagcttcaagaagctgtttcatgcttaatactgccatgcgtttgttcctccattatggttttattcctcttgacgacgtctcctcgcaagtggacttcaatcgaagcaccccactcacgatcaatcatcaatgtggtttgtgcatatcgcacttagaagattatacagacttttctttactttgacaagagcgtgaaccaccccggtttctggggtggtgatcgcgtttcggatcgtgatcaggtttctgcgcctgagaacgcgtttttgaagcaaccgcaagaaggtaatctttgcttcagttctattcttggtgggtaatctccggtagtccgagctggctccgctttctattctagaacctgagcaccagttgaccattgcatcattcgttaaatcatttaattgacatcaatcctgtttatcgccattcaacctgatgatcttccaaaaagacttccttacgatgccgggtctgatgtttgaaatgccattctgccgagagtgcatcatgcttgtccgcaaaggcttggtggtacaacaagcggaccggaagtcgttgggcagtgtatttagcgcctttcccggcattatgcgtggccacacgcgctttgacatcgtcggtgaagccgccataaaaactgccatctgcgcataacaacacgtaaaagtaatacgttttagtcgccattcagcaacctcctcaccgatgacgagtatgtgccatccgcttcgtgaacgatcaatggtggcataattcgaatcccgtttggtcggccggctttgatggcttcgattaataccatatttgcttcgcgatcttcccgtggatgaatgaactgcaaccgtttcggcgccaagccgaccactgtcaaagtcgtcagcagttcggccagtcgttcaggccgatgaacataaaaagctttgccttgatatttcagtaaatcggcactgacgcgcgcaaccgttgcgaagtcagtcgttaattcgtgccgagccaaggctaaatgatcatttggactagtgatactttgcgaactcactttaaaataaggtggattgcaggtgacgatgtcgactgaatctttggcaaccatttgggtggcatcagctaaatcaccgacttgaacagtcacattttgaagttgattcagcgccacacttcgcttcgccatatcagctaggcgcggctgtaattcaaccatggtcacctgctggtccgtgtcccttgccaaaaaaagtccgacagcaccgttcccggcggccagatcgaccacccggctgtgccgcttgacctgggcgaagttggccaaaaggaccgcatccagtgagaatgaaaaaacggctgaactctgaatgattttaatgttgcgactggccagaacatcaacccgttcacctggtaataatgacatcacgaacacctttttcctccgaagtgcgctatacaatggtataatttaccacaaagtttatccatgaaggaagaataagccatgttttatagttttctgcgttatatcattgccggtttaatctggctcatcaatggccacgcccaaactcagaacaaacagcagctacctgaagggccgtttgttttggttgcgccgcaccgtacgtggctcgatcccgtttttctagcactggcttcgtggccgcatcatttttcatttatggccaaaagtgaattattcaagaatcctttaatgcgctggctgttagtcaaagtgggcgcctttccagttgatcgggcccatcccggtcctagcgcgattaaagtaccggttcgtgcgttaaaagacgaacacaaagcgctcatgattttcccaactggctctcgctattcagctgatatgaagggcggcgcgattctcattgcaaagctagccaaagcccccatcgtcccagctgtttatcaaggacctggttctttttggtcattatttaaacgtaagcctgcgattgtgcgcttcggtgcacctgttgaaccgcctaaaggtaagctgaccgacgaagcccttgccgcttttagtgacaagctgcaggaaaactttaacgcgctcgattacgcgatcaatccagagtacaagtatgtgcctgacaagaagaaatatctggaagaaaaagaacacggagaagtttaaggttcgctagtcgaacctttttcctttttattcaatacagaaagtgagcttgattcatgaatctttggaaacagatgacccgaaaacctgatgttcaggccgcactcaatgctgatcatttactgacacgcagtttaacaacgcgtgacctgatcgcgttaggtattggcgccgtcataggtacgggaatctttattcttcccggaacagtagcggcgactaccagcggaccagcgatcacgattgcttttattttggctgccatcgtctgctcgctagcggctatgtgttatgccgaattcgcatcggctctgccagttgccggctcggcttatgcttacggcaatctcgtgtttggtcaagtctttggatggattattggctgggcacttattttggaatatatgctggcagttgccgcggtttcaaccagtttttctgcgtatttcgctagtcttctacaaggctttcacatcaccttgccagcagccattgccggtccgttttcgccgagtcacggcacttatgtgaatctgattgcggtcattgttgttcttatcattggtgttatgttgtcacgcggtatgcaatcctccatggcgattaatcgtttaatggtattagttaagttagtcattattgccatttttattgtcgttggctttttttacgttcagccagccaactggcatccatatttgccatttggtgcaaaaggcgtacttgccggtgctgcgatggttttctttgcctatctcggctttgacgccgtgtctgcttcagcaccagaggtcaaaaatccgcaacatacgctaccacgcggcatcatcggcactttagtcattgccaccattttgtatgtgttagtcgcgattgttttgaccggcatggtaccattcaccaaattagatgtggccgatccagttgcttttgccttgagcgccgtgcatctgcgtagcgttggcggtatcatttcggtaggcgccttggctggcatgttcaccatgatggtcaccatgatctacagctcatcaaggttgatttatgcgatcggccgtgacggactgttaccccgttggtttggtcacgttaaaggccatctgcctgaaaatgcgttgtggactgtggttttgatcattgcgatcatgggcggccttgtgccactcacgcaactagtcaacctcgtcaatatcggcaccttaattgcttttgccctcgtctcaattggcatcatccccttgcgccgacatcaagcctttaacaacgaaggtttcaaggttcctgggtatccagtgacgccgattatttcttttctgttttgtctgctattgatgacccagttaagtgtcgaaacttggattatgagtctgatctggtttgccttcggacttgtcatctacttcagctatggcatccgccacggtcatgttgccgaaaaaagaattgaatgaatctgctgaattaagaaaggaaaataagtcttgatcaatcctcaaactgcaacctgcttggtggacggtaaagtctatgcgattagcgatggccttttcttaagcgatttggagcctaagttggccaatatcatcagaaacgactatccgaaggcgactaagaacagtttcatctgcaatcctcaccttctgacttatcggctagaacgcatgcggcgccaacaacggcaagatgcgcgtgcgcatgataaaatcaatcgaaaaatgtcgcaggctttggtcaaagacaactttcagctgaccaatgtttacgacaacatggaagcgacgattacttttggcgagcgaattgccgatgccgttgctaaatatgccgggtcttggccattcattatcattttttctggttttatgattgtgtggatgatcctgaatacggtcggcattttcggggcgaaattcgatccatttcctttcattttgcttaacttatttctgagcatgatcgctgctttgcaagcaccactcattatgatgagccaaaatcgagcggccgaatatgatcgcttagaagcgaaaaatgattatcatgtcaatctaaaatcggaagaagaaatccgactgttacactcaaagttggatcacattatttcagatgacaaccccaacttatttgagagccaacgactcaccgttgaggttctgggtgaaatggtcaatcaactcactgaaacccgccagcaacttgaattgttaaaggcaacgcaggatcaggccaataaggatatagccattgatcaaaaaaacaaaaccaatgagtaatcatgtcaattcgatttatattgaaaaagatccccggtactgtatgcaagcgcaattgcctgtacatggtactggggatctttttaatgatttgcatttattcggcatgatcgccaatttgcagatgatacatttcatagtatcggccacgcttggctaacaattcgtcatgcgtgccgcgttcaacaattcgacctgcattcaaaactaaaatcaggttggcatcttgaatcgttgatagccgatgggcaattgcaattgtcgttcgcccttgccgaatccgacgcaagccttcttgaataacggactctgtttccgtatcaatgttggccgttgcttcgtccagtacgagaattttcgggtcagtcaccactgtgcgggcaaaggaaatcagttgtcgttcgccgctggaaaactcagtaccaccttcaataaccttagcatgataggtgcctggtagtttatcgataaagcgatcagcttgcacaaactcagccgcctgtttcacttgctcatcggtaatactgtcattgaacaagcgaatgttgctactgatatcgccatagaacatgaatgaatcctgcaatactaatcctaattttttccgcaattctggcatgggatagtcgcgaatgtccacgtcatcaattaaaatctggccttcaccaaactcgtagaaccgcatcataacgttgataatcgagctttttccggaaccggtgtgcccgaccaaggccacggtttcccccggattggcaacgaagctgatatcatgcaaaatatcgtgcttgccatcataagcaaaactgacatgccggaattcgattttgccttgttggatcagcgcatgagcatcaggatgctgcgctggcgcatactcttgactgtcgagaattcgaaaaatccggctacccgcaacaacgccatcctgcaaaaacgaaaggttatccatcatattaaccatcggattaaagaagtttgccgtgtaagtcgtgaacgcatagatcagtccagcttccacgtaactatgcatcgaaatcaatccaaaggcccataaaaccgcaatcaacgcaaaggaatataacaagttaatcactgacgacagcaacaaagaattgacgcgaatcatcgccttacgtgagtccaaatattcctcattcgtcgcttcgaattcttgactgatgcgattttcctgacgaaactgctgaatgatgccgatgccttcaatagattcgttcagttgggtattcaactctgacagtttttcacgcatgtgccgataaaccttggaactgtacgtgctgtaataccagaccactatgagcaaaatgggcagaaaggcagcgaccatcaaggctatctttggattggccgcaaacatgatggcaaaactgctaataactgagaataacccgacgataacagctaaaatgacgttccagaaatcggaaaatgtcattgtgtcattggtgacacgcgacacaatcgaaccagctggcgtttgatcaaaataccgcatacctaacgtgtgcagtttggcaaacagctgacggcgagcatcttctaagccgcgctctgcgcccatgttgaataaaaatgtctgaaaaaattggaaaacagctttaacgagcgtgccaaatgcatagagtgctgcaaacagcagcagaatctgaaccgttgcactttgattggccaaataacgatccatgaactgttggagaatgaatggtagcaaaacgttcatgcctgcaagcaacgcagccgccacaatggcgccaataaactgccgcttatacggtctcgtgtaccccatcagccgcttcataattttgagttgttgtcgaatcggaatacttttcgaccccagtttacaattcaagtgcaacaccctgacgactagaccataaaggccatgaagacctattcttgttagtgctagctaaacaagaaagcaggaatcttcatgacccactctcagactaacactcacaagcattaccaacaactcagttttagcgaccgtgctacaattcaggcccttcaggctgctggtgacaccgcgaccgtgattgcacagaagcttcatcgcagtaaagcgacaatctcacgagaaatcacgcgtggatctgtaactcagctcgactcgaagcgtcactcgcatcaagtctatcttgcggaaactgcccaagccatgcacgaccgtaaacgcgatagaaccggtcactacgcctttcttaagaccggccgtgcgttcttcaaggctctctccagggagcttactcgtaagccgcgcgtacacagcgttgatagcttcgtacacttctatcgcgaccagggcaaggcttgcccttcaacgacaactgtgtatcgctacatcgacgccgggctgcttgagctagacaacatgacacttcccaagaagctccgacgccgcatcaaaggctataagaacgcccacaagcgcaagaataagaagatatacggcgactcaatcgagttgcgtcctgcggccgtgaatgaccgcacaggcgtgggacattgggaaggcgacttggtcaaaggtattcgcttagctgatgagccagcattaatgacgctcacagaacggtacagccggactgagatcatcgtcaagattcctgactatcatgcgggcacctgccttaaagccttgcaggacacgatcgacgactacggggccaaggaatttgagagtatcacttttgacaatggttccgagtttgccaagttatcagagattgttggaacccagatttacttcgcacatccgtactcgccttgggagcgtggcacaaacgagaacgccaatggactgcttagggaattcttcccgaaagggaagtctctcagagcagttaccctggttgaaattcaagcagtccaatccgcactgaaccatcgtcccagacgtattctgaactatcttcgcccatgcgattactaccgatgcatggcgtaacagcctagaccactatcaagaattcgttatcatcgttgcacttgccttgaaaattgagggaatacttttcgaccaagcactctcataacccttacttgccaagtgattcaccttcttccgctgcttccatttcttgttttgcccacatttcggcataccagccatgcttggtaattaattgttcatgagtcccgcgctcaatcacctgaccattttcaaggacgagaatctcatccgcatgcatcactgagctgagacgatgagcagcaatgattgtcgtcttatgggcacgatcctgcttcatgttggctaaaatttcttcttcggttttagcatccactgcagacaaggcatcatcgagaatcaagagttcaggcgcgttgatcactgctcgtgcgatagacagccgttgcttttgaccgcctgacagactgactcctttttcacccaccagcgtgtcatagccagccgcaaactttttaatgtcctcgtgaacagcactttctttagccgcttgctcaacatcctgttgtcccttttcgaacgctgaaaagcgaatgttatcggcaactgttgtcgagaataagaagttgtcctgtggcacataaccgatcgaatctaacaaggcgtccagtgaataatctttgatattatggccgccaaactcaatcacgccatcgtagttatcaaactcgcgtaaaagcaacttaaaaatagtgcttttcccggcgccgaccttgccgacaatccctagcgtgtgaccttcaggcagcgtaaaatggacacggcttaaagcgacctgttgatcatccggataactaaatttattgatttgataacgaatatcgccatgcgctggtgtcgtaatcgcgtctttggcttcaaggatagtcgacttttcctgcaacagttcatcgacccgatcataactggcattcccacgttctagaatgttaaacaatcggccaatcgcaaacatcggccacactaatgctgacacatacgtcacaaaggaaaccagttggccaatcgtgatttgtccatgaacgacctgccagccgccatagatgatcgtgatgacataggttaagcccatgatcagacttgtcgttggatcaaataaggcatcaatcatattcacgcgccgattaatttgcacggtatggtcgacaatttgattaaaatctgccgtatcttcggcttcctggccaaatgttttaatgactttaatgccgctgacactttcctgcgttttatcattcaaacgtgaaaaagccgcctgcgattcagaaaaagccgcatgcaagcgggtgccgagttttcgtgccatcaccgccaataatggcattggcaaaatggcaacaatcgtcaaccgccagtcaacgaccaacaccatcgcaatgatggtggtgccgccagtaatcatggagtcgaacaaggttaaaataccggccccggcaacgttttgcaccgcgttcaggtcattggtcgcatgcgccatcaaatccccagtacggtgtttttgataaaacgtggcgtccattttcataaagtgccaaaatagccgcgtacgtaacgttcgttcaagcttcgcagcgccaccccagatcgcattacgccagccaaaccggaataaatactgggcaaccccggaaaacagcaataaccccagcatccacgccaagtgactgctggttaaccgagatttgctcatcgcatcaacgagatccccaataacttttggcggaatcaaattcaccaaggccacgagcagcaaaaaagtaacgccgagcaaataccggcgccattcttgtttaaaataccaacctaattttctaaagattcccacgacactgctccttaacccttttgctcatggtttccccatcagcatctcaaaataattaacgttctctcatcatagcacaaacgcactgggacacgaaagcgcgatgacaaagtgattcctgtcatcgcgctttcttagcaattacttagcgttacgttgggcttgtttcatttgcgccatcatctggttcagtttcttagcagatggtttttgacccatctgcatcatcatcgtgcgcagcatttcttcgttcacaggcggattatcctgaaaatacttcttcatgtaagcccgtgccccgaagaaaccgcctgccaagccgaccagtaaggcaatgatccccacaagtactgtgattaacaatgtgcggcctccttcaagtttcattcttcattgtactaaagcaggttgacgttgaaaagactaatcttttcgccaaccgtgttcacgttgaatcttttgaacttttttgctagtgagctccttgccttttttatcaaagacctgagtatgctcgatttgatctcgcaatccggcacgaaagtcctttaaataagcctcgcgcaattgttgacgctcgattttctcttcgggcgtcaaaccaacactgcgatcttttttagctaattcattgatacgatccagtcgttcttttggttgttctgccatcatgctacctcctacaatttcagtggcgtgcatcagttgagttgcactgcggcgtaacaataattcgccgcctcatgcttaggataaggcgcattctttaacatcgcaacatattctgcggctcgtcgttctgacgagaaggctttcaacaactcagtcggtgccgactgatccgcatagtagacgatgtagacaagctgatcatccatcagccttcacctcgagtctgtgggtgcttcttttttgcgtgtacgagttttccatcctactcatgcttcgctataacgcgcttgccagcccaaaaacctgcatgtaaggacatcagttgcagtgaccaaaagccggccatcacgaccgaggccacttacacactggtttctaagcgggctggctcacgctcaaaaaaaaagaccgtttgccggcctttttccagtattaacgacgcttttcgcggatacgagctgctttcccacgtaatgcgcgcaggtagtagagctttgcccgacgcacttggccgtgacgggtaacttcgatcttttcaacacgtggtgaatgtaacgggaatgtccgttccacaccaacgccatttgagatcttacgtactgtataagtagcggaaatgccaacgccgtgacgcttgataacaacgccttcgaagagctggatacgttcgcgttcgccttcaacgatcttggcatggacacggacgttatcaccaggacggaagtctggaatgtcatcgcgtaactgtttcttggtaatttcttgaatcaatgggttcatgggtatttctcctttgccgacattcataatcatcccgaccagcggaatgtcgttgatgtgtgacgtatcacagtcaataagtttaccatgactggttggacgtgtaaaggtgaaaatctttacggtatgctaacgttcaggattgattcttcaatcttgcttctgccgccttagtagcttcttctgttttaacttctcgcaagagtttttgagcagtttgatcgagcgtaatggttttcaagagatctggacggcgaagataggtgcggcgaaggctttccttttggcgccagcgagcgatgagttggtgattgccattttggaggacttcgggcactttcatcccccggtattctggaggccgggtgtattgcggatactcgaggagaccgttctcgaagctatcggtgtgggcactttcatcattgccgagaacgcctggcaggagacggacaatagcgtcaatcatgaccatagcagggagttcaccaccagtgagaacgtaatcgcctaatgaatattcatcggtgacaagcgtgcggatgcgttcatcgtagccttcgtagtggccacagatgaagacgagatgatcttcttgcgataacgctcgagcggcttgatggttgaacttcttaccagccgggtccattaaaatgactcgctttggaccggggtgacgctcgttgacaccatccatcgcctcaaatagcggttctggtttcagcaacatgcctgcaccgccaccatatggcgtgtcatcaacatgatgatgcttgtcatgactatagctgcgataatccaccacatcaaaattaagtagctcgcgttcaatcgccttgccgatcatgctttcgcgcaacggctcaaacatattcggaaaaagacttaaaacatcaatctgcatcgtcaatcaacccttccggcacgatcacatgcgccactttctgatctaagtcgatggactggacaacggattttaggaaaggcagtaaaatatcgcttttaccgctacgaggaataacccatacgtcattgggacccgggcttaagatttcattgactttgccgagcgtctgaccttgttcatcaataaccgttaagccgataatgtctttgtaatagtaacttccctcgtccagcggttgtaacgctgtctcggtaacttgcagtttcttgcctttaaatggcaggacttgattaatatcggtgtaatccttaaaggtcagcaaggtgagccccttgtgttctcgcacggattgaatcgtcaaggcagttttgggtgatgttgccacataaacagtgttaccaaccttaaaacgatcggccgggaaatctgtcgtgacaaggacgcgtacttcgccacgaataccgtgcgtgttcacaatggtgccgatgtcataataatctggcatgttcttcctcctctaaacgcgttcgctggcccagaaacctccacattaggaccttgaacctaaatggccacttatgctccggtttctaaccaggccagcgaacgctctttcaaaataaaaagaccgacgcggtatgcgtcagtctttttattctgcatgcgatgcatccaaaatattgagccgcacccgcttgttgtacgggcttttgacactatatacaatggttcggatcgcttgcgcaacccgaccttgtttgccgatgacgcggccgacatcttcaggtgccacagccaaatcaaaggccatgtaatcacctgtttcatgcgcagtcaccttgacggcttctggttgtgtaaccaacggggtgacgattgcttgaatcaagctgccgatatccaccattgataaccgcctttatttcttggcaaagcgcgcttcgtgatacttctgcatgatgcccttgctaccaagcaagttacgtacagtatctgaaggttgtgcgcctttttgaagccagttcaaaatatcttcttcatttaatttcaaatcgactggattagtcaacgggttgtaatagcccacggcttcgatgaaacgaccgtcacgcggggagcgtgagtctgctacaacgatccggtagaaaggcttacgctttgaacccatccgctttaaacgaattttaactgccactaagtccacctcctgctcatttatcaaccttgatagcatagcaaaaatattttaagctgtaaagccttttttctttacacaggtaaaatgtgtcgtttggcaacggtcttgttcctaattggttggtcaggaaaaaattaatttttaggaatggaaacgcttggcatttttcagccgacgtttcttgttcttcttttgtttgcggaccattgagttcatcgccattttgccaagtttgccagaaacgccgccgcccatgagaccgtcgaggcccttcatgttacctttgctcatctggttcatcatttgcttgctttgattaaactgcttaatcatccgattgacttcaaccactggccggccagaacctgcagccaaccgccgccgtcgacttggattgagaagatctggatcttcgcgttcttgcggtgtcatcgagtaaactatcgccttcatgtgggcaatgtctttcggatccattttgacattggccaaggctttgttgtttgccattcctgggatcattttcatgatatcttccagcggacccattttgctaatctgatccatttgatccagaaaatcattgaagtcaaaagaattctcgcgaattttttcagccatttccatggcttgtttttcgtcgtaattcttctgtgccttgtcaatcaaggtgagcatgtcgcccatgcccaaaattcggttggccatgcgatcaggatagaagacatccagcgcatccatcttttcaccttgaccaatgaacttgatcggcttgccagtgacggcacgaatggacagtgcggcaccgccacgagtatccccgtccagtttggtcaggacaacaccggtgatatctagctgctcattgaagcctttagcaacatcaaccgcggcttgcccagtcatggcatcaacgacaagcaaaatgtcgttaggatgggctagttccttgatgtttttcagctcgttcatgagcttttcgtcaatctgcagtcggccggcagtatcgatcagtacataatcattcttattttctttggcagtcgccaacccttggcgaacaatttcgaccggatcaacgtcggttcccatttcgaaaactggcacgttgagctgtttgccgatagtctgcaactgatcaatcgctgctggccggtaaacgtcagcagcgatcaataatggccgcgcactgtcattgtccatcagatacttggacaacttaccgacagttgtggtttttccggccccttgcaaaccagccatcatgatgacagtcggaatatgtggtgccttgttcagtggcactgccgcctcgcccatcgtcttgaccaactcgtcattgacgattttaatgatctgctgtgatggggttaaactttcaagcacttcagcgccaagcgccttggtgcggacgtttttaataaatgttttgacaacatcaaaattgacgtcggcttccaacaaagccaagcgaatttcgcgcattgcatcgcgaatatcactttcactgaccttacccttacgccgcagtccgctgaaagccttctgcagtcgttctgataatccttcaaatgccataatttccccctgctatttcgcggtttgatccgcgactcgttctaataaggtacttaatgccttgtcgtctggataatgtgtacgcgcataactcactaacgtatctacagcttcattttgcgcttgatagttggcgaaaagatgcaacttcttttcatattcttccaagctggcctcagtgcgtcgaatattgtcatacacggcctgacgcgagacattaaactcggttgcaatctcgccgagtgagtaatcatcaccgtaatataatgccagataggcgtgctgtttgtccgtcaataacggcccgtaaaactcaaacagcgagttcatgcgataatttttttcgatttccatcatgtcattcctttaatcccatgattgccggcaactcagtttccccggccgcttgaacatggtccttgtataaggataccggtatcgctgaaaatggtcaattacttaaaaaattaggttgatggccacggagctaaatgctagcgtagaaagccagcttcgactatcggtggataacagccaagaaatagggtcggagaaaagatcgctttcttgcaattgcttcaaaaacacatttgcatccgtagaaacctgcacataaggaccttgaacgaggttggcacatcgttttcagacaggaaaaggcttccataaaatattgtttgttttagtcttctcgtggagtatttactgcaatttttaaagactgtggtgccaaggcggagcaatcgtaggccagatggggcacagccgtgcaaacaacacagcgaccgggctttggagctgatgttattaggcgacttcgagaccgggctttgggctcgaagcgccgcctccgctctagcttcgcgtcgccaccccatctggccggagattgcggagtttggcacggcaagaaggttttagcctagcccttcctacgattgttcggaatttaatgactcacaagtcctacgaggaaaattatggttcatcctctcggaggttccgaaacgcgcgaacaggcgcagaaacctgcacataaggaccttgaagctaaatggccaaaacccagccatttagcttcaaggccacttatgctccggtttctaaccgcgcctgttcgcgctcttccagtttcccctagtttcgtggtacactgaacatgtgaaaaattggagggaagaatatggtctcaacctttatttactgggccgtgtttgccgctctcgctgcttggggactgtggagtttggtcttctcatgtgtttacctgagcaaccatgaaaacggcaatttgtggttctttgctatcattaatgcgattcttggccttctaggctggttattcgcttggatcatgagtaatacggcatggcaacaatactggtttgcaagtaaggtgcagccatctgcatggttcacctacctgctcatcggttaccttgtcttgattgtcctacaggtcatccttggccgggagaagaaagtgcaagcagcttaatgtcataaaaaaagcgtcgtactggtttttcgccagcacggcgctttttcgttattcttcattttaattaagcttcgacctgaatcaaacccttaaatagtccggccacaaatttggttggatcaaaagcttgtaagtcgtccatcttttcaccaaggccgacaagtttgaccggtacatgcagttcattgcggattgccaacacaattccgcctttccctgaaccgtcaagttttgtcaaaacaattccagtgattttagttgtttgattaaactccttagcctgattaagtgcattttgaccggttgtcgcatccagaaccagcaagacttcctggggtgcatccggcaattcgcggacaatgacccgcttgattttgttaagctcattcatcaagttgaccttattttgcaatcggccagctgtatcaacaagcacaacatcaaattgctcatccttggcgcgtttgacaccatcaaaaaccaccgcggccggatcgccgccttctttcgtggcaacgacaggtacatcaacccggcgaccccattcctgcaattgctggatggcgccagcacggaatgtatcggcagcaactagcagaacccgcttaccttcttcctttagctggtgggcaagcttgccgaccgttgttgtcttaccagcaccgttgacgccgacaaacaggaacacacttggccctgattcagcaaaatgtagggcattgtcttcatccttaccagcatcgccatacatatccaccagcttctccacaatcacacgggaaacggccttagggtctttggcatttttaagcttaacttcttcacgcaggtcgtcactaagcttaactgccgtttcaaagccgacatcagactcaatcagcatctcttcaagattgtcaaaaaagtcttcgtcgacactacgaaaattagcaaacagtgcattgagtttttcaccaaaactgctgcggcttttttctaggccctcatcatatttattttcttcaggcgtttccggttcatcaccggtaaacgcctttttgatcgcatcaaaaagtcccattaattgatcgcttctttctgtgattgatccagactaacagccataattcggctaacacctgattcttgcatcgtgacaccatacaatacattcgccgcaaccatcgtgccatgccggtgagtgatgacaataaattgtgtggcgctagcataatgccgtaagaattcaccaaatcgattgacattaacatcatctaacgaagcttcaacttcatcgaggatggagaatggtaccggacgcacttttaaaattgcaaataacagaacaatcgccgttagcgcccgttcgccaccggatagaagggaaagccgagtcagttttttgccaggcggctgagcggaaatctcgatccctgttgcgagcaaatcatccggattcgtaaggctcaaatgtgcatgaccgccaccaaacatttgcgggaaaattgcttcaaaagcactattggtctgatcaaacatatccttaaatcttgttttgaccgtttcatccaattcgtgcatcgtttcttctaactgctgcttagcctctagaagatcatcttgctgcttggtgagaaattcgtagcgttcattgacttccttaaactgatcaattgcgttgaggttcaccggtcccaactcatcaatgccacgctttaaaagcttgagtttacttttcaattcaggaattggcgcgtgatcggctgtcactgcttccttagcggcctcgtaagtcaactgataatcctcggctaaagtattcaaccgagcatccaaacctagtttaactcgattcaaagcaaccgcttgctgctcagaagttgccatagcttggtgttgctgctcataagtggtcgtaatacgcgccgatatttgactcagcttaccacgattttccgccttttgttgtgttaatttggtttgatccgccttgagctgctttaattcagtttgcaaattcgcgatcgtagcggtacgactggccttttttgcagcagtttcttcggccgtcgcagtaatgtgctcaattcgttgttgcaaatcggtcgcttgggcttgcgcatcgcgtgcttgcgtctgccattgccgttgctggtcattcaaggtctgcaaatcattggttgtgactgctagcttggtcttcaacgcattaaccgttgctgcatgctgggtgctggatgccgttgccgccgcaacagccgccttagcattttcaatagttgcttgtgcttcagcaatatcttgaaccaattttttaccttggtgctgcaactcagttaatttggcactaagatctgcttgcgccgtatctgcttgttgcgccgctgccagctgacgttgcgcctgacgcaaggtttccgcttgggctgtgtgctgactcgtaattgttgtcaactttgcggttaatgcctgtgcctgttgggaagccgtttgccaagctgcctgggccacgttttcttttttcgtcaaagcagtcagatcagcttgctttgcctttaatgtttcaacaagcgtttgcagttggacctttaaatgccgggcctcttgactgcgagcaagcggcgatgcttggcgtccctgcttgacttggcccccagtcaacgaaccccccggatttaaaatgtcgccagctgttgtgacaattcgataacgatggtgggtggtattggcaatcgcgatggcatgtggcaaggtatccaccatcaaaacgctgccgagtaagttcgccatgacgtgtgccaaatctgcaggatattgggctaattgcaacccagtgcctaaaaagccttcagcaccttcaaccaactgtagaaccgcactgggcagctctcttggccgcataacggcagccggcaggaaagtcgccctacctgctcgttgttgcttgagcaggctaatggcgcgttgtgcagccgcttcgtcacgggtcacaatggcctgtaagttgctacccaaggctaagtcaaacgcctgttgatagtcagttggaacctcaagtaattctgcgaccgcaccaatcactccgggaagttgatccttatgctttaaaaccacccgaaccccattgtaaaagccagcataatcatcattcaattcggataacgtttcatatcgcgcccgactgcgctgataggtggccagctcgtcttgataagcttgctgttgggccgcccgttgttgctgcaatagatcacgatcagttttggcctgctcaacggctgtttgctgttcatcaacctctgcttgcaactgttgctgctgcgtcaataatgcagtgaccttggcttcctgatcctgtgcatgtttactcagttcgtaaatccgacgatcatgcgcagcattttggctggcggctaactgttgatctttttgtaaagcagcctgagcatttttgttatcggcctgtgattttaacagatcaatataatgattctgggctacttccacttgttgattcagtttggctggatcctggtttgcctgtttctgctgagccaattcttgcttaattgcttgctctttttcggcggcagcagttgtttttgtcttaagttccttcaatcgctgatttgcttctgttaacgcttgttgagcacgcgccagtcgttcctttaaatcggccaacgtggtttcagcattagcagaacgttcactagataggttggcttctccgctaagattctcaagcttcatcgaccggctcaagacctggtcattcaactgattaagctggttctcaaactgtcgatctacggcacttaaccgctccgactgatcttccaaatctttaaccttcgccgtcaaagcggcgatggtttccttggtgaccttagcctcaccttgggttttctcctgttcagtcgctagttgttcgatctctaaggctaataaggtttgatgaatctgatgatactcgccggattgttgttgatagtccttagccaacgaagcctgctcacgtaatggttccacctgatgcttcaattccacgataatatcgttgatccgcgccagattatcatcgttattggcgagttctcgttctgccttggttttctgttgtttatatttataaacgccagcggcttcttcaataatgccccggcgttcttctggtttactattaaatatggcttcaacccgcccttgggaaatgaacgaaaagctttcacgccctaagccggaatccatgaacaaatccacgatatctttcagccgaacatcttgaccatttaataaaaattcagatgtcccatctcgataaagtcgccgagtgacagaaacttcatcaggttgatttttcagataaccatcatgattatcaaaagtcatcgtgacagatgcacgattaagcgctggtcgcgtatcagtgcctgcaaaaatcacatcgcccatccgttcgccgcgcaagcttttagcactttgttcgcctaaggcccagcggatggcctcagtgatattacttttgccactgccattaggtccgacaatcccagttaaacccgacacaaaatcaatctcagttttgtctgcaaatgatttgaagccattaatgattaaacgctttaattgcatgatgaccccaattctacttaccgcttcaagctggctaatgcagcttttgcagcagcttgctcagccgctttcttattcttgccaaaaccggtacccaaaacccggccatcgacttcgacatcaacgtggaactgccgctcatgggctggtccctgctcatctaataagtgataaacaatcgccacatcaccattttgctgcaaaacttcctgtaaagccgttttgtggtcttgatcggctgaaaactcacccgcgtcaattttcgggaaaataatctgctgagcaaaccgaatgttggcatcgcgtccttgatcaaggtataaggcgccattgaaggcctcaaataaatcttctagcaacgttaagcgtttccgcgccccagctttttcctcacctttgccaagtttaatataccggtcaaagtgcgcttcttttgaaaaagccgagaaggccgctgtctgaacagccgctgcccgaattcgggtgagatcgccttcgggtttgtcgggaaacttgcgatacaaataatctgaaactgtcaattccaagacagcatcgcctaaaaattccaatcgttcattgtcttttaaacctaattctttatgttcattcacatatgaggaatgcgtaaacgcctcatccaatagactgaggtcatgaaattcgatcccataacgttgacgcaattcactcacaaactctgaggcaaccattaaaaatcctcctcgaaaatgcacgcatgagctcgtgaacggcttgggtcataagtttagaagtacctatcagaggctggctatcacttctaagcagctgacacgccattgctaaaccggacgcattcacgcgctctttttttattaccttctaattatacaagagcgcacaaaaaaagacacctgcgattgcaggtgccctgtaagatctaacttttacttagaagcacggctgctgcttgtaacagtcatcttagcccaattcaagttagcggttgatgcatagtcaacactcgcgttcttgacgcgcttgttaaccggatagatttcttgacggtacagagtcgggatgacaaatgcttcgtcattcgcatacttctgccaatctttcaaagccttggcacgatagctagcacttaatgccttctggccatcaatgtcgttcaacaattcggtgttctttgcggaaacaaaccgactgtagttgaatggtgctttttgagagtacagatccattggtgaaggatccgaagaaagactccaagccgctgcgtaaacatcaacgtccttgtcatccttttgaactttgtcgtagaaagagttaaattcgatcggacgacctgttgtcaacttgacgcgcagaccaatcttcttccattgctggatgtagttttgtgccattggttgagcggttgagccaccagccatagttgcaaagttgattgtcaacttcttgccatcaggatcggttcgataaccatccttgcccttcttataacctgccttatcaagcaaactgttggccttcttgatattcaagttataaccatcaatatcggcatgaacatctttaccaaagactggcggaatcaaggttgttgcgcgagaacgcgtgccgttatagaacttagcagccacttgatcgttgttcattgcgtaacccattgcctgacgcaaactcttgttagccatcttagccttaggattatagatgttttcgctcttgctatggtcccatttacctaacttaaagccaatatagttataggccaagctctgtcgtccaagattgtcataaccgccgatactcttccaatcattgtagctatcagctggcatgttataaacaacatcgtacttatgattcttcaatgctgatgtaatagaggcagttgaaacattttcaaaagtgatcttgtccaatgttggcttgcctttccaatagtactggttaggcgtatattcaatactttgaccggcaacaatcttgctcatcttataaggaccaaagaagagcggctgtttacgaactttgtcgcttgactctagcttgtcaaaagcaacgtcatgtagatagtgatatggagccgcgttttcaaggaaatagccgttccctgaagtaccaaacgaaggcttcatctgcttgaagtgaatgaccattgtatcgccattatcacccttgggcatggtcaatccagaaattgaatcagctttaccatcatggtattcggtcaagccttcgatgttctgaagggattcagtataccgttggctcttagtagctttgttagccatgatttcatacgcataaaccaaatcacgggcaacgactggttgaccatcagaccatttaacatttggtttcacagtcacggtaatcgtcttggcactattgtcctgcttcaaggtcgcagctccggtgttgttgaacttaaatttgctgttgtaagcaaataaagactctgctgccgggctcatatattgattgtcataattgtcggtgtacagctcttcgttaaagacccccttaaatggtgaatcattaaccaccgccacattgacattaccgcctttgatcgcctttgcggagttgttgtaagaaaccgggaacttcacagctttattagctgtacttgagctggagttcgagctcttactgccacaggctaccaaggtgatcgataaagcggtagcgagcgtgatcattccgaacacagaacgcttcttcatactttttcccccttccgcgtcgtcatcgcaatatgtaaacgaagcaacgcttcatgtgagttaaatgatagcataattagaacagaaaaaccaacttttgggcacattttttactttttttcttcaaaaaaggagagacacttcgatttctctaagtgtctctccagtgattttcagaaaatgaaagtcaacctcatccgcgacgctggcgtgaatccgctgcacgacgcagtgcttgacccacaaagttgatcgacagggatagtgtcagcaagaccaacacggctgggaaccaaacccaccaacgatcaaagatcaggtcggggttggaggcatagccgatcagcgtccctaaactaggcgtctccattggcaacccaaagcctaagaatgacagagcggtttcaatcccaatggaactggcgatggttaaggtcaaatcagtgatgattaaggaactgatgttaggcaagacgccggtgaacatgatcttgaaattagaggttcccgacgttttcgacgccatgacatactcactgcgcgcttcagagagcaccagcgagcgcatcagtcgagtggtcgtcatccaatagaacgccgccataattaagataatggtgatgacgttgtactgcggaataatcgtgaccaagacaatgatcaccagcaatgatggaatgatcatccagaaatcgaccagtcgcatgatcacggcatcaatcaagccgccgaagtagcctgagattgtacccagtacgacacctacaaattcaatgatcaacgcaacggaaatcccaatggtaatcgaatttcgggctgcaaaaaacagatacttgaacatgtcacggccaccctcatctgtaccaaggatatagccgccggttccgggcgccatatagcgatccaaaatattaacttgcgtcgcaccgccgacattgaacatcagtgaaccgatgaacgcagcgaggataatgaacacagccaagaataaggacacaacagcaactttatctttgcgaaattcattcaaaatcaccttgaagttagaaggtgattgttcaactttggtggttgccgccacctcatttgcattattttgcataagttttccccaccttctactcgatccggatccgcggatccacgatactcatgatgatatctgacagcaaattccctaacaacgtcaagaaaccaaatagcaacaccagcgagatgacaactggatagtcacgactggtcatagaagaaacaaacagttggcccattccgggataactgaacactgtttccagaataaccgatccacccagtaacatggtaatttggttccccataaacgccgcaatcggcaataaggaattacgcaaaatatgtttgttgaagatgacgcgatccggcaccccttttgaacgggcagtccggacaaaatcttgtctcgtattatcaataacgccagttcgcaaatactgaatcgtgcttggtgtggtgataatcccagcaaccaaggctggcagaatcatgtgataaatacggtcccagacataccctaacgtgcccggattataagtggatgacacactaccaccggttgggaaccactgcagaaagaacccgaagaaaattaaacccaatagataaaagacgaatggcggtaccgccatcaaaatgaaagagccaacagagatagctgaatcccgcttggtgccttcgtaacggccggcaataacaccggctggaatagcgataacgtacagaataaccgttgacatcaaggccaaccagaaggtgttcacggcgcgttcgccaatcagaccggtaacagaacgtttataaacgaagctttgtcctaaatcaccgtggaacatattgccaacccatttgaagtactgaatataccaaggatcattcaaaccatattgctggcgtaatgctgccatctgcgcagcactttgaccttgcgagaaattaccagtcaatggatccccgggcatcatctttgatagcatgaaaaccaggacgcttaacaagatcaattgcgggatcatgattaagacccgtcgcagaattgttttccacattaatcatgcactcccttcatcgttgaatctggcagcgcaacaaaatgtgtgtcggaaatcttctggagatccaaaacgcggccttctttagaataatattttgattcttcttctttaaaaacacgttcgacttcacgacgatgctctttattcttcttccgatcatcagggttgatgtcaggaatcgcagaaagcagtcgttgcgtgtagatgtgctgtggatggttgtagatatcttcacgcgagccgatttcaacaaagcggccgcgatgcatgatcgccatgttcttacacatgtgcttcacaacacctaagtcatgggaaataaacagataagaaatattgtattcctcttgaatccgcttcatgaagttcagcacctgcgcctgaactgacaagtccaacgcagagaccggttcgtcagcgataatgagcttcgggttcgttgccatagcacgggcaaccccaattcgctgacgctggccgccggaaaactcatgcggatacttgtacaaagcatcgcttggcataccaacaatatcgagcaattcttggacgcgccgacgttcttcatccccagtaagattctgaaaattgcgaattggttcagcaataatatcctcaattcgctttcgtggattcaaactagataaagagtcctgaaaaatcatttgaacgtctttgttgtactgcatatgtttccgaacgctgcgtttggtaatatcctgcccttgatacataatcgagccggacgtgaccggttccaaacccacgattgctttgcctgcggtggattttcctgaaccggattcgccaattaacccatatgtttcgccttgttcaatatcaaagtcgatcccatcgactgccaaaacatgatccgtcacccgattaaaaaaccccgagcgaatcggataatgaatttttagatttctaacctcaatcattgccataatttactcacctttttcagctgcttgttcgtcatccgggaaatagaagtccttgtagcaggtacactgaacaaagtgatcagggccaacttcgtgcatgatcggatgctcttcatgggctgatgcaggaatccaaggaatccgagccgcaaaccgacaaccttctatctgcatattcttcaatgatggcacaacgccttgaatgacatgtaattcgtcgtcatctgaatctgtctgtggcatggagcgaagtaaactgcgcgtgtatgggtgcgttggatgcttgaaaacatccattaccgaaccactttcaacaatttggcccgcatacataactgccacacgatcggccgtttcagcaacaacaccaagatcatgcgtaattaaaataatgccagaatgcatttcccgttggatgtcttccaacagatccaggatttgggcctgaatcgtcacatccaaagcagttgttggttcgtcagcgatgataatcggtggtttgcaggcaatcgcaatggcaatcacaatccgctgccgcataccgcctgacaattcgtgcggatatgaacgtgccgttcgctcagggttgggaataccaacttggttcagtaattccaagacgcgactttcacgctcttctttgttcatcttagtgtgatagaccagtgtttcttcaatctgctcaccaatccgcatcaatgggttcaaagcagccaatggatcttgaaagatcatgccaatatctttgccacgaattcggtcaaaaagggcctcattcaagccaacaagattaagattgttgtacaaaatatcgccagtgaccttcgtattgcgcggatcatgaaggccgataatactggttgccaaagtacttttaccagaacccgattcgccaacaatagctaagatctcatcttttcgtaacgtgatgctgacatcatcgaccgcatcataatagtcgtctccgagtctgaatcccgtgtgcagatgttgcacatccagcagcaaatcttcaggtttatccaagcgaactcctcctttgcgtcctcgacgcaagattaaaacaagatgagatttttgaaataattgtctctaagtataaagaaattatagcggttatgcaagcgaaaaatgcgttctaaagctgttttgccatgtcaaaagcgaaaatttgatggcatcattttgggccctggtcgccgaaatttagcgaactgtgggcgctcaatgagttcgtagcagcgaatatttcgaaaagaataatcttttgatgtgtcgaacgttgcaacttcttatctgtggccaacatcttcggttcgctgaaagacaaacgccatccccaaggccttatccgtcagcgtctcagggacagtgcccaagtgcgctcatcacgctccagatcaaggtctattacacgatggtttctagccaagcaaactcttaaaaaaagccgtccatctctggtcggctttttgtcacttctgatgggcgttgatgtaatcaacggcatcttgaactgttttgatgttttcggcgtcgtcatcggggatttctgctccgaaggcatcttctaactctaaaacaaattcaacgatgtcaattgaatccgcatcaagatccttttgaaagttaagtgtcgggctgattttatcgggactcagttgaaaatggtcctgaattaggccggcaattttttgataaatttcgtcttcactcatgttgctcctccattcatctgccaatttagtgtacttgtttgccactggaatgtctacgctttctcagcggttttcgcttcggcaacttctggatgggcatcaaaataatcggcaactttcgtaacggtgccattttgaaccattttggcggtttgcagcaaagtataataaacggtctctgcatctgccgcaccatgagccttgattaaaggtgctttgagccccagcaagaccgcgccgccgtatgacgaaatatcaaaggttgaggccatcgacttgagattacccttcaggaacaaaccgcctaatttgccggaaaggcccccttcatagatggctcccttcagcatgtgcatgaccgtacgcacagtgccttcaattgccttgagcgttgcgttaccggtgaaaccgtccgtcaccacaacatcggcaggaccgtttaggatatcactagactcaacgttaccaacaaaattaatccccggagccgcggctaataaatcatgagcctcttgatgcattttgtcgcctttgttggcttcagtgccattgttcagcaaaccaactcgtggattttcaacgttgcgaacatctttagcatagtaactgcccatgatggcatattgtaacagatgatacggacgattttcagcgttggcaccgacgtccagcatcacaaagcctttgccgtcaactgtcggcaaggttggtaacaaaccggggcgttcaatggcacgaatgcggccgataataaacaagcctgccgccaacaaagctccagttgagccgagtgaaaccatcgcgtctgcctcgccttgtttaacggcttgagcggctaagaccatggaagcctgttttttgcggcggatagcacgaacgggttcatcgtcgctgttaattttttccggagtatgaatgattgttaaccgttcatcatgatgaataagcggtttaatttttgcttcatccccgtacaaaagaaatgtcaattctttgttggcatctctagctttttcgaccccggcaatgacaacttctggggcgttgtcgccacccatggcatcaatcgcaattttcattcaattcgttcctttcaagttttaatccaaactaccgagcatctgccggctttccgccaagtaagcggcaagcggctgatggtcagactgcagcaaatgtggatcggttttaaaaatctgggccacaatcttttgcgcagcttctagggttggaaaatcgcccactggatcagcgactttgaactctggtaaaccagattgcttatctccaaaaatatcacctgaaccccgcatttccaaatctttttgggcaagtaagaacccgtcgttggtcttggtcataatttccatgcgggcaattccttgctcatttttgggatcagcgataagcagacactgtgctgccttttgcccacgtccgacacgcccgcgcaactgatgcaattgagaaagtccaaagcgatcagcatcaaaaattgccatgacagtggcattaggtatgtccactccaacttcaacgacggtggtcgaaaccagaaccgcgatcttcccatcgctaaaagcacgcataatctgatccttctcgtccggcttcatctgtccatgcaataacgcaacagggccaagattgccgaccgctttttgcatatcaacaaaaagctgctcggcattttgcaaatcaattttttcggattcggcaatcaaaggggtgatcgcaaacacctgactgcctgactgcacctgctcacgaatgattcgataaacttggtcaatctgatttttgcgcagccacatggtcgcgatcggcttgcggcccgcaggtaattcatcaatcgtggagacatccatttccccataggctgtaatggccagtgttcggggaataggcgtcgctgtcattgacaacaaatccggcttttgtcctttttcttgaaggatcttgcgctgattaaccccaaatcgatgctgttcatcaataacaaccagaccgagcgcatgaaagtcgacccctttttgaatcaacgcgtgcgtgccgatgatgagattcaggcggccatcacgcaactcacttaggagctcgcgacgctttttggttgacgtcgagccagtcaacaaccctaatttgactggaaaatctttgaataactttgtcaatttggcaaaatgttgctcagctaacacttcagtcggcaccattaaagccgcctgaaaaccagcggtcaccgccgcatacagaacaatggcggcaacaaccgttttaccgctcccaacatcgccttgtagcagtcgattcatatgatttggccgccgcatatcggcacaaatttcgtttaccacgcgtttttgagcattcgtgagcgcaaacggcaatgtcgctattagcgcgcgcaaggcctgattgtcataaggaatcgccaacccgttgctgctgttggcattcagttgttttaacgcctgaatttgcaattggaaaaggaaaaactcccggaaaaccccagtacggcgagccgcctttgcttctgctggcgtatcaggaaaatgcatgccatgaaccaactgagcatcactcattaagcgataatgctcgcgaatgctggcaggtaccaaatcgttgatattttgctgatcgcgttcccaggcagctttgatcaagtcgagtaatgtccccatgcggacatttttgttgacggtgtaaatcgccgccatcgacggttgatcctgcgactgtgtcgcgagaattttcatgccggtcagactacgacgcttggcatcccattttccaaagattgctgcttcatcacccatctgaaaacgatcttttaaccatggttgattaaaaaacgtcaccagaatcacgctacgttcaatttggagcttcacgttaacgcgactacgatgcggcccaaatcgactaataaccggatcggtcacaacgatccccttgaccgtcaatttttcctgatcggctgcctcggcaagatccttcactttcaaatcatcgtagcggtaaggaaaataaaataggagatctctaatggtgtgaataccaaggcttgccagcccagcttcacgtttcggaccaacaccaggtagaacagtaacgggatcagtcaaagccatcaaggcacctcctttttcaaaatatagcaaaccactaatgagtgtgttactgaccatctggcctaatgacgccaatcgcacgcttttatataaatttcgcaaaaaggtgccccgcatgcgggacacctgtacgcgatagctgtttaagcctactcaactgagacgaaataaggataaaccggttgatcaccttgatggatttcaaattccaaatccggatattgcttaccgacagcatcggcaatcgcctttgcttccgtttgattagcatccgcacccacgatgatggtcacaatttcactatcgtcattgatcattttatcaatcatcgcaatccctgctgcttcgcgatccttatcagtcactgtgatcgtaccgtcgataatccccatccagtcgtgatctctgatcgccaatccgttgatcgtcgtatcacggatggctcgggtgattgacccgctgatcacattcggtagttgggcagtcatttcactttgattagtggctagatctgcatcaggactgtaccctagcatcgcggtcattccttggttgatcgtcttacttttgaccactgcaacttcaacgtcagtcgccgcttttgccgctgcttccgcggccatgaagatattgccattgttaggcaagacgatcacgtgcttggcatgcgctgctttaaccgcatccaaaatatcgtttgtgcttggattcatggtctgaccgccattgagcacatgcgtcacgccaaggctcttgaagagttctccgagtccttgaccagccgcaatcgcaacgacacccatttcagctaacggcttttgggccacttgttgatccaatgcgccttcacgttcaataatgctctcctgttgcaagcgcatgttatcaactttgattttcatcaatgaaccaaattgctgaccataacggaaaacagtccccggatgctcagtatgaacgtgcaccttgaccacttcttcatcagaaataaccaaggtcgagtcaccgagtgtattcaaatagttacggaacggttcgtagtcaaaatgtttgaggttttggccatcaccaagttcgaccatcatttcggtacagtagccgtatacgatatcggctggatcaagctgtacttgcgcactttgatgatgcacagcattaatcatttcgttcatttcttcgtcagtgacgtcatgaacatctgaactaattttaccggacaagccttcttggaaaccctcgtaaataaaaacaagtccttgtccaccagaatcaaccacgccgacttctttcaagacggccaaaagatcaggcgttttggctaaggcacgtttagcacctttcacaactgcctgcataacaactaaagcatcatcagagccattagccgcttttaagccagctttagccgcttcacgggcgactgtcaggatcgtgccttcaaccggcttcatgacggctttataggccgtctcgacgccatgtgcaaacgcatcggctaggtcctgagccgtcagacttttcttatgcgccacgctttttgcaaagccacggaaaagttgcgagctaatgacgccagaattgcctcgcgcgcccatcagcaaacctttgccaagatgcttggctaagtcaccaactgactcatcattagactccaacaccgcttttgcgccagtttgaaaagtcaggttcatattagtgccagtatcaccatccggaactggaaaaacgtttaatgaattcacaaaatcagcatttttattgatgcgatgtgcggctacccggatcatatcctggaatttagtcgcggtaatttcggttactgccacggaacatcctcctcgaagaacttcaatatgtcacaccgttaacaaccggtgcgtgtacgtcagtcgcctaataccttgacgccttggacgatgacggtcacttcatcagtcgtgacccccaacatcgtttcgaggttgtattttactttgtcttggacatttcggcaaacttctgaaattttagtgccataactgacgataatgttgacttcgattttcacgccattatctgtctgacgaacgacaacaccgcgcgaataattttcgcgtttcaaaatgtcattgagattatcgcgaatctgattacggctagccatgccgacgataccatagatggacgtcgccgcaccgccaaccaccgtcgcaatgacactgttggaaatgtcgatgattccgtatttggttttgattttgaccgccatgctgtttcctcctaagccattcgcgatgattttcacatcgcgtacaattctaccagctagtttagcatagctaagcgatgactgcgagcagagcgtgaatcagcccgattagaaaccgaagtgtaagcggccttggttgtgatggccggtttttggccattgcatccaaggtccttacacgtaggtttctgggcctgttcacgcgtttccgaacctccaagctcacaaatacctaaattttgatcacttaaacctgaggtgcctatgtgtcagtttctggtcttgtcgctacctttatgagacaatcgttaacagtaacatttttcaaagaatatcggactatttgtacttacccacccaattttcttagagtctgatcacgcgtttattttgacctgtcaagtaattttactttgcaaaaattcttgcattaaccgcgggcctatgataagttagttgagtgaaaaattcgagggtgaccttgaaaaaaaggaggtcatattgtggctaaagatattattactggtcgtcataccacgtttggcaacaagcgttctcacgctttgaattcaagccggcgccaatggaaagccaacctgcacaaggttcgtatccttgtcgatggtaaaccaaagcgggtatgggtttctgcacgtgcccttaaatcaggtaaactgacccgggtttgatcccataacatttaaaaaggtcctgacaatgaatgtgatgcatccttcattgtcaggacctttttttgttgagcgcgagcaggagcgattagaaaccggagcgtaagtggccttgggtgtggtgaccgacttttggccattacgcccaaggtccttacgagtaagtttctgcgactgcgagcgcgttatgacaaaacgcgagcaggagtgcctagaaaccggaacgtacgcggattttaagcggttggcctaatatccctcatacaatcggtgattcgttggacgccaactaatttgggaaaaccttgggctaaaatttccttgccatgccaaacgccgcaatctccggccagttgggactggtacgcactttttcaggatcttgatatgctgacttctcagatcggtagttcattaaagcaaatcaggaagaaaacaatgcctaattatccaatttttgcccgcgccgatcacgactataaataattgccacctgaccagtcgtccaactcacggtgaagggctgcttgccaagaaactcattggaagcccacacataaggatagcccgctcgccatggttttaatggatatttcgctccgacaatggtcaaatcggcaactggggtgagattgacaactgcaacgtaccgataacctggcagcggtttaatttcatgctcaccggggctgtaataatcaacccaattttgcacatcaaataaatgaaggcgttcaacatctgctaaaaagcgcggttgaagcggtaagaaaagattagacaaaaaatgatctagtcgtccaccagtcccgccaaccaaggtgacatcgccggatgaagatgcctgaagtgccgctttaacagccaactctgtatccgtgtcatctttttcagaaggcacctgttgtagcttctggacatgcccacgaactagccgcaattcttcaagcgttaaggaatcaaagtcgcccactgccagttcaggatgaatccctgcacgtacgagtcgcaatgtgccgcgatcaacgccgatccatacaccgggcaattgttcccaagcggctggcaagcatgcctgtggaccacctgccatgatgttgacgtgcgtcatttaacagcctcacgcaagctattcatcgcgtcaccgacatttttggacccaaaaacatacgaacctgcaacaaaaatatctgtcccggcatcagctgccgccttcacggtttgattgttgataccgccatcgacttcaatgtcaaaatgcagtttccgagctttacgcagctgatataatcgatcaaccttgtccaccatcggcgtcaaaaatttttgaccaccaaaaccgggattaaccgtcataaccagcacttgatcaaccaacgggagaacttcttcaagactgctcaatggtgtgcccggattgatcacaaccccagcgcgaacgcctttctcgatcacatgctgcaaaacgccataaagatgatccgtggcttcttcgtgaaccaaaatcgtatccgccccagcttcagcaaaatctgccacccaagccgctgggtcactgaccatcaagtgaacctccaatggcagactggtaaccggacgtaatgcttggacgaccagcggaccgaaagtcagatttgatacaaaatgaccgtccataacatcaacatgcagtaaatcagcaccggctttttcaactttttcgacatcccgcgcaagatgagcaaaatcagcacttaaaatcgatggggcaattttcataacgatctcctccatatattgcgttcatccggccattaatcagcttgacgtccgcattttgtctaatctaagttacttcttcttgtaaactgggcgcttgccgcttaactcttcacgaaactgtaagtagttatcataacggctttgcatgatatcgccagccgccagtgccgccttaacggcacaatgtggctcgctaacgtgctgacagccgcggaatttgcaattgggtgctaacgccgcaaactcaggaaaacggtcacgcaaatcatctaaggtgacgtccagtaaaccaagcgatgaaaaaccaggtgtatcagcaactaagccaccgtgaatcggataaagatcagtggtgcgggtcgtgtgccggccacgatttaacgcatgactaatggccgctgttgccaagtccaatcctggcacaagatgattcaacaaagtagacttaccagcaccggtttgtccagtgaaaatggtcaatttatcggcaaagctcgcttgtacttgcgcgaggattgtcggatcaaagggcttgtcaggtgcaaaaaccggatagcctatttttgtatagccggctaaatcttgacgaatcttcgttaatcgctgaggctttgttaagtcggtcttggtcagataaatctccgcgtgaatatcgtggccctcaagataaaccagaaaacgatccaataggttcttagaaaagtccggctccacggcggaagtgatcaaaacggcttgatcaacgttggcaaccggtgggcgcaccaacgcattatgacgcggtaataccttcagcaaatagccttcatcatccccttctcccggttgaaaagcagcaatgtcgcccaccagcggcgtaattttgtcgttgcgcaaactgccgcgcccgcgagttcggtaagttgtcccattcacagcgatgtcgtaatacccgctgatctgtttaataattcttccagttaagtcttcactcattgagtaatgttatcctcctgcgcaatcacggtaccgtcccggacaatccgatagctgcctgggtatttcgtgctaacttgcaacgtgatggtgatttgatcatcagccgtgatgttaaaggaccgattaatggtactaatgttatgtgtcttatctgcgaagaagacctgaataccgttgggtgcgggcgcagcactactactgctactagtgctgccactgctattgctggcacttgcggtactcgaactggccggtgcttgatagggaattgaaattgttttcgaccaagttttggtctcttcaggatctgggccttgagagaccgaaacattgactgtgtcgcctggtttaacctgtgtcccagcagctggcgtttgactgattaccatgcctgtatcgacggtatcagagtgcgcttgagaaatcacaatcttaagtccgacttcattggcgtaatctcgcaaacttttttcggtataacccgtcaaatcacgaagcgcaaaagtatttggcttgattgcaacggaaacaccaaatgtgatcgtcgttttgtccgcaatgacctttttgcctgctttaatgctttgtgacacgatcttgcctgacggttcgtcattggcgctgacctgtttttctttgacggttacgccgcgtttttgcaagtctgacttcacgtctgtgtaatcttgcccaacataattctctagcgtaaattgcggctgaccgcggcttaaaatcagcttgaccgtcgagccttccttaacactcacctgccgttttggatctgaatcgatcaccaaatccttgctaactttcgtggaataagtgtacttgtatgacccaacttttaagcctgcgctggtcaaggcagtttttgcctgggttgtggtcatgccccgtagatcggggacgtccacatcccttttctgattggcaaaaactgcgccgataccaatcatcagcagcatggcgacaagtatcccgatgccaataatccaccaacggcgactttttttcttaggtcgtgctttcggacttggctgactcgctggactgtcagcatctcctccttcgtcatgcggcggtttgggaccgttggggatgactggcatgattcgtgtctcatccagatcatctttaggaaccacatactttgcttcatgtgctcgtgccggactcagcgctgtcttgaggtcgctagccatggcatccgcactggtatagcgattagccggatttttggctgtagccttaaaaacaacattctccagtgcctgcgggatatgcggatcaaacgcgcgcaccgacggaatttcttcttgaaaatgctttaacgcaatcgtaactgccgaatcaccttcgaatggtacagaaccagtcagcatttcaaaaagaataatgcctaacgcataaatatcactttgacgggttggcatactgccgcgcgcctgttccggtgatagatagtgcaccgaccccaataatgagttggtcatcgtcatcgaattctccgataacgcgactgcaatcccaaaatcggtgatcttagcattgccatccggatcaatcaaaatattctgcggtttcaaatcacggtgaatgatattgtgatcatgcgccgtctgaacggcagaaaggatctgttccatcatgtcgaccacgcgctgatatggagtggggaaatgctcgacaatgtagtgctttaaatcagagcctttgacatactccatgaccagaaattgctgaccttgactttcaccaacgtcataaatcgacacaatatttggatgaaccagctcactggtcgccatggcttctcgttgaaagcggcgaactgtatcggggtcattttgcaaatcaagccggagaaccttaaccgccacatcgcgatcaagaatcaggtcgcgtgccaaatagacgttggccataccgccttcgcctaatgttttgataagcttgtagcgctcatttaaaatcgtccccggctcaatcattgcggctccctccgatcctgatgaatgatcaaggcactgatgttgtcaggtccgccagcagcatttgctttgaggatcaattcttgagccttgctgccaatcggcatgtcctgacgcaacactgccgcgatatcttcattgtcaaccatgttggtgaggccatcagaacacaacaacaaatagtcgtcatattccatatcgtaaatcgtcacatcagcatcaacatcactgctgacaccaagcgagcgcgtgatcacgttacgctgcggaaagcgtttggcttcctcaggggttagttccccatgtttgaccaactcattgaccaaactatgatcctcagtaatttgaactaaatggccattgcgatagaggtagccacgtgaatcaccaatatttgccaccacgaatcgtgtaccgctgataatcacagccacaaccgttgtgcccatcccagaaagatctgtatattgtttcgctttttgcaaaatcacatcattttcctgctgcaactcaaaaatgagccaacggacgatggactcgatctcggcagtatctgttttctcaaaagcataacctaaatgcgatactgccatttcactagcaacatcaccaccacgatggccgcccatgccatccgccaccaaggccaacgtcgcttcggattgatttttaaaaataccgacatagtcttgattatttggtcgccgacgaccaatatcagtgcgataagcgaactccatacatacccctcatttgcgacgaatcaaactggcaatgaaaaatccgtctgtatcataatcatctggaaacagttgcagcgctggtgcgttatgcgccttgtgcaatggcttcaaggttggtactgaaacttgctcgaactcaggatgagccgccaaaaattgtgcaaccacatcttgattctcttctttcaccattgtacatgtactatacgtcaggcgaccaccgatttttaaggttggtgccacactatttaagattgctagctgaatttgttgtaaatgcgccggatcttcaggcgtttttgtgtacttgatttccggtttacgtcgaattaaacctaatccggaacaaggggcatccaccaaaattttgtcaaaagaattggcaggaaatgttgtcgcaaccttacgtgcatccagcacctgtgcatgaatgcggtccttcaagcccaagcgtttagcgtttttattgatcaaacgcactttgttggcgtgcagatcaagcgccgtcacttgtccgccttgttttggatcaagatactgagcaatgtgggtggttttaccgccaggagcggcacaagcatccaaaacaacatccccaggctggatgtctagacttggggccaccagcatcgaactttcatcttgcatcgtatactcacctttgacaaatgcggatgtccctgctaagtggccactaggtgcaatgaggccaattggggtcaaaggactttccttcaaatcggggaattccggctttaaagaagcaagcaaggcagctggggtgattttcgtcgtgttgacgcgcagtgaagcatgcgctgggacattgatgacattcaaaatggcacgggttttcggttcacccagttgtgccgtcaatttttcaacaagccacaccggcgtactgctttcgattgacaatcgcttcacaggatcagcgattgcggctgggtcaggaaaaccagttcgctgagcatttcgcaaaaccccagtcacaaatttggcgattccttgatgtccaagtttcttggcaatttctgtactatcaaaaaaaaccgcgcgtgctggtactttatcaagatactgcagttgataaacggctgtatcaagcaaacaccgaatccaattgtcgagtttccggcctttgatgaaaggtgccagataaaaatccaacgtcagctgatgctggatcacaccataaacgatgtttgtcagcaagccagcatcacgcggcgtcaacttgtgactattaatcacgtgatccaatgtcagatttgaatagccaccttgcccagtgactcgcgacagggtttcaacagctaataaacgcggattattcggggtcatcagtaatcacctgctgtcctgagaccaattgttggcccggtccattcaaaaagtcggcaattgattgtttagccttgccagccggttgtagttcatccacttggaaagtggtttgttggccggcaaccatcaccaaacgatgcttatcccgttcaacaatactgccagcaggaagcgttgatcctgctgatagcggcgtaatcgcccacaacttcgtccgttgaccatttaaataaacatacccgccgacatcgggacgcaacgcccgaatccattgatcaagggccttggctggcagatgaatattaagatgctcttgctctttggtaatagtcggcgaaaaggtcactttatctggatcttgaggggtccgggtagccgtgccagcaatgatcttcggcaacgtttctagtaacaaatcgcgaccgagcaatgacaatttggcaaaaacggttcccgtatcatcagcacgcgtcaatggcagttttgcctgcgcaaacatatcaccagcatccattttcttcaccatttcgataatcgtgacgccagtttctgaatcgccattcataatgctgtactgaatcggtgcgccaccgcgatattttggcaacagcgaaccgtgcacattcacagcgataattttggctgcttctaaaaattttgttggtaaaaattggccatatgccgccgtgacaatcaagtctggtgccatggcgatggcttgcgccagctctgggctgccactcaatttttccggttgcaaaaccgggatatcatgtttctgcgccgcctgtttaactgggctagccgccagccgctgcttgcggccaactttacgatcgggttgcgtcatcacggcaagaatgtcgtaatgctgggcaatcagtccttcaagaatcgggacagcaaattcgggtgtacctaaaaaaattactgaagtcattttttcctccaaacgatgagttgctggtaggttggtgcctattttgccatggaacaggttaagacgtttaaacaaatgccaacggttctggatcaatcgcgactaaaaagccgtgacgactgctttgctgggtctcttccaaaatatgctgcagggttgccgctaacgccggctcgtgtttatattttagaacgatttggtaaatatagcgatttttcaaacgagcaatcggtcctggtgtcgggccaagcatgatgacctgatcggatagatgctcacgtaattcttttgccaaagaaaagatagccttagccgcctgtgtttcatcaacatggctcacagcgattttcgttgaataaaaatatggtggataattgccgcgatgccgaatggccatctcttgccggaaaaagccttcgtagtcctgccgtttggcgtattgaatggcataatgatctggattgaaggtctgaacgaagacttcaccgggtttgtccgcccgaccagcccggccactcacctgtgtgagcaactgaaaggtcttctcactcgcccgaaaatccggcaggccgagcgctgtgtccgcattaatgacaccaactaaagtcacatcgggaaaatccagtccctttgcgatcatttgcgtacccagtaagatatcggcctgatggtcaccaaacgcatctaagatccgcgcatggccacctttgcgccgagtggtatcaacatccattcgcaagattcgggcatctggcagcaactgctgcaacttcgcctcgaccttttgggtgccagtaccgtaatagcgaattttatcagaaccgcagtttgggcaacgatgtggaatcggttcctcatggccgcaataatgacatttcaaggtgtgtgtgtccatgtgcagcgtcagactaatgtcacagttcggacattttgccacatagccgcaatcgcgacacatcacaaaacttgaataaccgcgccgattcaagagcaacacactttgttcctgtcgctgtagtcgaattctcaaggcgtcaagcagcgggcccgaaaagtcctcttgcgcgccgtgcgcaaaggcttcccgcatatcaacaatatgcactggcggtaatggttgatcgttaatccgatgcggcagccgcagcagtgtataaacgcccttttccgctcgagcgcgcgactccaatgaaggtgttgctgagcccaacacaaccggtgcatggtgaatctgtgcccgttttaacaaaacgtcacgggcgtgatagcgtggcgccgaatcttgtttgtagctggtctcgtgctcttcatccatgatgaaaacgccgatgttttttaacggcgcaaatgctgccgatcgtgcgccgacaacgacctgagcctcgccgcgcgcaattcggcgccattcatcatacttttcgccatcagacaagccagagtgcatcacggcaacatgcgtcccaaaacggccttttacgcgattgaccatttgcggcgtcaacgcaatttccggcacaagcatcaaagctgtctgtcccgcggctaaaactcgtgcaatcacctgcaaatagatttctgttttgccagagccggtgaccccttctaacaaaaatgttttaggatccctttcggcaacggcagcgttaatttgcgtcacaatcgtctgttgttctggcgtgagcggcaacggcttcgtcaacggttgatgctgcagttccggataaggatcgcggtaagtctcgtggccttcaagcttcagccagcctttttcgactgcctgattaatcaccggctttgtcaggccatattgatgttcaacggtcatcaaagcaggatgctgattgttagcagcccattcaccaattaaagttaacagtttaagttgcttggcggcgtttttacgcacgtgttcacgctcggcagccgcttgctccagtgataattgcgggatcaagtaaaagatttttttaacccgagcacgatccttttttaaatatgaaatagcaactttacctgcttgcgccaatttcatcactgcaacttgctgttcagcgttcaagctaccgatcgccagactgtcagccgttccaaaatatttttgttgttcatcagccgtcagcttaaccggttcagcaacttttaccgcatcgattttcaacatagttggcaacattgtctgcatgcacgcaatccaaaaagaatacgttgtttgcgccaaccacttcgatagctttaataattcgtgatccaaaaccggggccggatcaaggacatctaacaatggtttcaattgaccgtcatagtcgctttggtcggagactgacacgaccatgccgctcacttttcgcgcacctttgccaaactggacccagacccgcattcccgcctgcaaagcgtcttctaagcgcgcaggtacaagataatcaaacggtcgatctgtttgcatcgtgggcacatccacgatcaccttggcaacaattgccaagcgctcaccccttttgttttgctaacatcgttgcaagttgctcaatcaaagcagcagcgacttttggcttgggcatttccggcaaggtcactggtgcctgttctggccgcaataacgtcacagcattcgtatcagtgttgaatccgtgagtcgcatcaacgtgattggccacaatcatatcagcatttttcttagttaatttaagttgcgcatttttcaaaagatcattggtctcagccgcaaacccaatcaatatctgatgcgtttttttacggccaagtgatgccaaaatgtccggattctgaaccaaattcagcgtcagtccagaagtcgcatcagtcttctttaacttgtgatcactgacggttggcaaccgataatcagcaactgccgctgccatgataaccgcgtctgcttcggtaaattcggcatcaattgtgtctgccatggattgggcactttcgacttgtttgactgtcacaccgggaacaactggtaactgtcgcgttgtgaccagcgtcacttcggcaccagctccggccgcggcattggcaatcgccgtgcccatcttacctgaagagtcgtttgtaaggtagcggacaggatcaagtcgttctttggttccgccggcagaaacgatgatacggcgaccacgtaaccgcgggtcatctaaactttcgatgaataaggcaatccgttctggctcaggcattctcccgataccggcatagccttccgctaacaagccagtttcaggtggaagcacgagataattttgttcagtcatcaaactagcaatattcttttgcgtctgcggattttgccacatctggtcgttcatggccgggaccaacaactttggtgcctgcattgccagcagtgttgtcgtcacaacattatcagcaaggccgttcgccagtttagccaacgtattggccgttgccggtaccacaacaccaagatccgcccaatgtgccaatgccacatgggcaacatgttcaggatgatcaaattcatgcccgtctgtcaatacagccgccttgctgacgatagccaacgtctccggcgtgacaaatcgttccgcacttttggtcatctcaacccgtacatcatggcctgctttgattaaggctcggaccagtaatggcactttataagcggcaatcccgccagtgacaaacaaggcaatatgttgcttcttcatgtcgactcctttcgcacttcaagctaggaccattataccaaacgcacactaaaaagaggcaggagcacttttaagcgccactgcctcctgtattgccagccgtctttaaacgccattgtcatcagacagccagaacgatcgatcgcttattcctgatccttgcgatccaatttttctgcatcacgctcaagcattttagacttaggatcaatgatgacatcgccagccgcaatttcttcaagcgctttgccaacacttttatcagacttataatctgacaacatcttcaaatcaccagattctaattcatgggcacgttttgccgccaatacggctagcgaataacgggacggcaccttttccaatagtttatcaatcgaaggataaataatcatgagatgaaactcctttttctaatagatgggcatgaaccccgcgctatgcgagccagccacagacaactatcttgccaaatctgcacttgctaacatgcccttgtaacgatcaatgacgcgtggcacccgcaagtgctcgctttcaataatacgttcgatgcgcttaactgctaaatcaactttatcattcaccacggcataatcataattttccatcatggtgatttccgaagctgctttgcgaatccgtttatcaatggtcacatcatcatccgtgccgcgtcctttcaaccggtggcgcaactcgctaagatctggtggtgtcaagaagatgaagacaccgtttggacattttttgcgaacctgcatggcaccgttaacctcgatctccagtagaacatcgcggccggcatccaaagtttcgttcacatattttaacggtgtgccgtagtaattctcaacatatttcgcatactccagcataccacctgtcgcaatttcgtgctcaaactgggctttcgtcctaaagtaataatcgacaccatcaacctcaccaggccgcatttgccgtgtcgtcattgaaattgaatattgaaaatctcgataattaccatccagcattgcttgccgaaccgttcccttaccgacaccactgggcccggacaaaacaattagcattccccgctcgtgcatgtgtgaacctctttcgttaagtattactgaacattttgcactttttcgaggctgatttcaactgcatcaccggtgaaatggtgaaaagtgcgcccgtttgagggcaatctgagcatcacggcgccccaaagcaatcatattagcgatggcttcaggccgaaaattaaacagtccaggcagccgctcactgggtttaagatagagatcgccatgatcagagccaatgcggccaattccttcgccgctaatcgcgatgacataatcagcaccaatttgccgcgcaatgtcaacaggcaagtcattaacaaccccgccatcaacataactcaccccggcccgctcaactggcgaaaaaacgcctggcatggctcttgaagcaagcaaccactcccgcgcctcaggtgcagtcaacacatccagtcgggtcacatgtgcttgaaaatccgggacactggttgtcactgctaacaccgcccgcgaatcgagtttgggggcttgcagcattcgatctaatactggcacaaaatgacgccgcaaaaagatcggtccattcacttttgcttcggaaaaatgctgccaccattgtggtacttgctcgggcagcatacgggcggttccggcagcattgatggcgccaattgacgacccaatcacaaatgtcggacgtaatcgcggccccaatacggcccacacaccggcttggtatgcgccgtgggcagcaccgccgccaaaaacaactgctattgttgccatcgcttgttccccccaaacggcgtgatccactgatttaaaaaaactagttgcaactttgaacgcttgttcgtataatgaaattacaaacaaatgttcggaggcttgatcatggaaaacaaatcatctgcactgcaaaccgttacccgtcatctcgtcgcatcttatcgtgaattcttcgatttggcggcaccaaatgcaaaaatgccttcccatcagcttgatcttttccttgatcaggccatgcatcgccagtatcaagtggcgctgttctttgatcaagatcggccgccatttatcggtcgcattactcggccattgggtgagaaacggtatctggtcaaagcataccatagtaacgtctatcggatcatcaccgaagcggaggtatcctacattaaacgatttaaatgatcggtgttggccggttgcgcagtgtcgcgcgctaccatcatgccattcatcgcaggctgctgatcatcgaatccgaatttttgggcttgcatgaatggcatttaattcagatgggattcatcaccaccaactaaaacgacactagggtttctttctagctgctatataaagacgcctgattttcctaaatatggaaaatcaggcgtctttcgtttggcatagatcacttattggaaactaaaactgataccggcaaagcaaagaaatcattgaccagatgtactgtcgtagacaattcagtcacttaactcatgcgtccatgtttgaattcgtctgccattttcaacaattcttccgcatgttcaactgtcagcttagtgattttctccccagctagcattcgcgcaatctcatcaacgcgggcctgatcggttaatttcagaacttgcgtcgtagtgcggccattatgaaccgccttactgatgacatattcatgatcagccatcgccgccacctgaggcaaatgggtgatgcacaacacctgcgaagacttagcaatcaagctaatcttattggcaatcgcctgcgcaactcgaccggaaacgccggtatcgacctcatcaaaaatgatagccgtcacaccttctgttttcgcaaaaatcgtcttcatcgctaacatcaaccgcgacaattcaccgccagaggcaattttagctaacggtttagctgactcaccaggatttgtttgaatataaaattcaacctcatccagtccatcagcccgaaaatcctttgccttagcaaaatgcaccgaaaaaactgttttttccatatacaatgatgctaactgctcgtgaatcgctttcgtcaattgcttagcggcggcatggcggcgttttgacaaagccgttcccagcttctgcaactgattctgggatgccttcaatgtcgtatcaagatcttcaaccgaagtttctgcttgttccatttggttcaattcagtcgcggcccgcttgccataggcgatcacttcatcaagcgattccccatatttgcgctttaactgattaaatagatcaagccgcttttcgacttcatccagccgaccttcgtcaaattcctgatcatccaattccttcgacaagtcattttggacatcttgcaagctgtaataggcgctttgcaaattgtcagcaatggcagcaaaattcgtatcaagatcagcaatactttgcatactcgacatggcctgaccgatttgatcaagcgcattcacttcttcatcactcaataaagcatagctctcctgcaatgctgaattaatcttttgaaaattggcaagcctttcacgttctgcagtaagatccgtatcttcatgcggctgcagattggcactttgaatctcacccacctgaaatttcaacatatccaagcgttgtgcccattcttgctcatttgcctgtttttgcttcacggcacgcaaggtccgttgataatcgtgataaacatcagcgtattgttgccgcaatttcagcaagtcatcgccggcaaacgaatccaataaccctagatgcgtttctggatgcatgagctgttggtgttcattttgcccgtgaatatcaaccagcgtttcgccgatcgccttcaaggtcgttgtattgaccagatgcccgttcacacgacaaacattacggccagtgcgaaaaatctcgcgctgcaacagtacggtgtcattttgatctggatccatgaccccatatgcttgcagcttagcctctgttgccggattttcttgcgcatcaaagagaccttctaaactggccttagtggtgccggtacgaataaaatcgactgagccgcggccacctgccaacaagccaactgcatcgataatgatcgacttaccggcacctgtttcccctgtcaaagcggtcataccgggctgaaaactcagcgccagatgatcaatgatggcgaaatcatgtatcgctaactcttgtaacatcgcttcaccccaccattgcttcaagttcagccaacactgccgttgcatattttgcagaccggcagatgatcaaaatagacgcatccccgctgatggtcgcaaaaatacgctgatcatccagttgttcaattaaagtctcaactgctgccgctgtcccaggcaataaggccaaatgaataaaattatccatggcctcaccccacttcatcgcggtgatgagcgttcgccgcaatttatcagtggctggcaattgtttttctgccggcatactgtaacgataatggccttcaccagcaggcactttgatcaactgcatgtccttaatatcacgcgaaatggttgcttgcgtgaccggaatatgcagctcattcaatcgcgcaaccaagtcttcctgacgttcgattggttcatcttgaatcaatcgttgaatggttgcctgtcgttcgcgcttgcgcatgtgctcacctctgtcatagatggctttgttcgatcaaaactagtcaaacaaaagctttaccaatagcatagcgcacgaactagacagataccaagtttttgcataaatattcattatggccgatgtaaatcaccataagcggcagtcaaagtttcttcaatatcgacatcaggcgccatttttccaggcgtttgcgcactattttgcagatgaattaaaaattcaatattaccttcgccgcctttgatcggactgtaatccaatcccaagacatcgtatccagcctcaagtgcgaaatcaacgatcattttcagcacgtctcggtggacctgcggatcgcgaacaatcccgtgtttgccaacattagcaggccccgcctcaaattgcggcttaatgagggcaaccgcatgaccaccgggaatcagaattgcttttaacggcggcaaaataagctttaatgaaataaagctgacatccgtcatggcaaactcaactggaccatcagtgaagtcttccggcttactataccgaaagttaacccgctccattactttgacccgaggatcttcacgcagtttccacgccaattgattatagccaacgtctaatgcataactcatcttggcgccgttttgtaaggcaacgtctgtgaagccgccggtcgaggccccgatatccaaaacggttttgtccttcaagtcaatattgaagactttcaaggctttcgctaacttcaacccaccgcgactgacataaggcatttttttgcctttcacatgcaaaatagcatcgccagcaatttttacgcctggtttgtcgagtcgctgattgttctgatcatagacttcaccagccatcactgatcgctttgcttgctcacgagattcaaataaaccttgttcaactagcaaaacatcaacgcgttcttttttgatttttgtcatgctttcaacaccgccaaaatctcagccaatggcgccgcgtcaactgtcaattcgtttaacgccgtctctgcttttgcaatttctacctgcaaagcttggatagcaccgtccaaccccaataactcgggaaaagtgttcttatgctcaatgacatctttgtcagccgtttttccgagttcagccgttgttttggtcacatcgttaatatcatctttaatttgaaatcctaagccaaaagcggccgaaaaatcagccagtgctgtttggtcagtctccggaatggtcacaaacagcccgcccatcgcgattgcggcttggatcaaggccccagtcttagcttcatgcatgcgtttcaaagtttcgagatggtactgctcgttttcaccgtccatatcgagcacttggccaccaaccataccgttgctgccagcggcttcggccagaatctgcacacatgcggcgcctttttcaggatactcgcggctcaagatggcaaacgcatcggtcaataaggcgtccccagccaaaatcgctaaggcttcgccaaactgcttatgattggtcggcttcccgcggcgcagatcatcgtcgtccattgccggcagatcatcgtgaatcaatgaataagtatgcacatattccaaagcagcagcagccggcaatgcatcagcaatcacaccgtcatacatcgccacgacactcaacaacaacaatggtcgcaggcgcttgccacctgcctccacggaataaaccattgccgctcgcaaatgcgggttagcaacagcagctaattgctcgtccaacgtctgttcaacggctgtgcgccatcctgctaacatagggctcattgctgatcatcctttggcgaaaatggttgcgtcgtcccatcgtcactgaccatttcggtaacggttttttctgcagtttttaatgttttctcaaggtcctgactcaatttaacaccggctttaaattgatctaatgccttttccagcggtacatcgccctgctcaagctgattcacgatgttttccaattgtgcaagtttctcttcaaaagtaggttcagccatgtgttttctcctttgtggtgacgtgtgcgccgacttgtccatcagccacgtgaatatgaatatcttgatctagctcgtagtcacttagacttttcagcatctgaccttgtttatcggtcacgtaagcaaatccgcggcccaagatttttaacggacttaggtgatcaaggccactcacggcactagcaaatgcctgacgcttagttttcaccaaaccgcgcatcgcttgatccaagcgatgacgatccccagtcacttgccgctgcaaattgaccaatcggataaacagttgccggccatccaattgggaagttgccattgccaaacgatgatcagcatcgcgcaggcgattatgcatactctgttgtagccgttgttgaaattgatcgactcgctgaacgtattgatcataaagtcgatccggttgcgtcaacacaacactttgtgcagaacgctgcactcgaatcgcggcatttttgagccgattatgcatggcattgaccagtcgcacccgatcttcagaaattcgattaagcgcatcaatcaatgtcacgggcgttacaatttccgccgcagcagttggcgttgccgcccgtcgatcggcaataaaatcggtaatggttgtatcggtttcatgccccactgagctgacaaccggcatcggcatgtcgaccaatgcgcgcgcaactttttcctcgttaaaaggccaaagatcttcaattgaaccaccaccgcggccaatgatcacagcatcgaatccacctattgttttaatctggtttaatcgtttcaccagtgaatcggcggcttgatcgccttggacaactgccgggaacagcgttaattgcaaaatcggatagcggcgtgcgaccgtcgtcatgatatcttgaatgacggcaccacttgggctggtcacaactgccacccgtttgggaaagagtggcagtggtcgttggttgcggtcaaatagcccttcagccgccaactttttcttcagttgctcaaaagcttgataaagcgcacccacaccatctggttcgagatgttcgacaattaaacgatattcgccgctgggttcatataaactgactcgcccaacaactaggactttcataccttcctcaaggtcaaattgaaccttgctgaaggcattacgaaacatcagcgcaccgattttagcgtgatcgtctttgagtgagaaatactgattacctacacgtttgcgataattggaaatttcacccgtcagatagactttggcaaggtaagggtccgcatcaaatttgcgtttgagatattgagtgagtgccgtgacgcttaaatattgactggcatcaaccatttgctcgcctcttagccaaggtcactgtctgggccatgagcgaagcaattgtcattggccccacaccacctggtactggcgtgatggcgctggcaatcggcgccaccgcggcttcgtcaacatccccaagtaccttaccgtcagctccacgcgaaataccaacgtcaatgaccactgcccctggtttcaccgcatcggcaccaataaaatgcggcaccccaacagcaaccaccaaaatatcagcttcttttgccagctgtttaagatcacgggttttactatgcgcaattgtgacggtggcatcgtgattgaccattaaaccagccagcggccgaccgacaatgtttgaacggccaatgatcacaacccgtttgcccgcaacatcaatatcataagcatccaacaacgccatgatgccataaggcgtggacgccacaacagttggttcattggcccataaccgccctacactaaccggactaaacccgtcaacatctttatcaggatcgatagcatcaatcaccgcctgttcatcaagtcctgctggtaacggcaactgaaccaaaatagcatcaatatccggatcatgattcaactcggcaaccttcgccagcaagtccgcctgcgttgtcgcttcaggcattcgaaacattaaagaacgcacgccaatatcttctgcacggcgctgtttattacgtacataaacctcactggccggatttgatcccaccaaaacaactgccaatgtcggcgtcacatcgtgttgtgccaattgagcaatggtttgcttaaggtctgccagtattttctttgaaactgctctgccatctagtcgggttgccaagagcttcactcctcattttatcggcgcttgttgcgcgcaatcgtcacttatcaatatgcgaacatagtacgaccaaagcaagataaatcaaaaccggtcaaagcaaatgcctttgaccggttgacttatgcttgcggcgttgcttggatgaagttcgccaaaatgccattcacaaacttggctgattgatcatcgctgtaacgctttgccaaattgatggcctcattaatcgccgcagcttccggcatcgcttcttcataacgaatttcgtatagacctaatcgcaggatgattaaatccggcttcgtcaagcgactgagggtccagcctttttttaattgcggcgtcaaggcagcatccaaatcagcctgtttactcaaaacaccctcaaccagcgtggttaaataagccggtacctcggtatcttgaggtaaaacttcggcatacaccgcatctttatcagcttccggattggttgccaaggcaaacagcgcctgaaaagcagcctcacggatcgcatgtcgtgattccatcttattcgtcatccttgccgctagcgctttctgcatcgtcagtgtcggtatcatcgtcgttgaacagattatcagggtcaactttttcagctttttctggaatgatgccaacaacgtggacattaacctcgctgagcgtcaaatctgtcatgaacaaaagctgttcccgtaaccgttcctgcatcgtcagtgccactttaggaaccgagacgccatagtctagatacacataaacgtcagcggcaatctgatcatccgtcaccgtcacactgacgcctttgccatgattagcccggccgaaccaggcgttaattgaagcacccagtgagccgcgcatttgatacacaccatctacttgactagccgcgatgcccaagatgacttccaaaacttcaggaacaatctcaatagtcccctgtgcatcggtgcgattcgctaatatgatatttgtttcttcagccatcgtgagaacctcctaagccctagttgttggcgcgtgaaatgtaggtgccatcatcagtattgatcgttaaaacatcgtcaacattgatgaaaaacggtacctgcacgaccaaccctgtttccatcgttgctggtttagaaccaccgctacttgtgttgccacgaatgccaggttctgtttctttaaccactaaatcaacagtctttggcaactcaattccaagcgtttcattaccatgcatgataattttgacattcatattttctttcaaataattcaattgatcgcggatctcgtcgccgggaagcgtcaattggtcataagtatcggtatccatgaagacataattgtccccatcggcatacaagtattgcatgttcttgctgtcaatttgcgccttttcaactttttcagttgagcggaacgttttttcttgaacagcacctgtacgcaggttcttaagggttgaacgcacgaaagctgaacccttacctggcttaacatgctgaaactcgacaattcgccaaaggtcaccgtcgacctcaatcgtcaaaccatttttaaaatcattaacagatatcatgaacttcctccatacattcagtcgtaaactaaacctattctagcaagcactgcgaatgcttgcaacagcagagcgtgagcaggcgcggttagaaaccggagcataagcggcctcaagcctaattggctgggctttggtcaattaggcttggggcccttatgtgcaggcttctgcacctgcgaacgcgttttagccaaaaatcaataagctaaccgatttgactcacaagtcagcttctggcacgtaacttacagcaccaacaactcactaggtgctggttgactcaagctttgactacccgcagcagtcactaataaatcgtcctcaatccgaacgccgccaagatccggtacataaataccaggctcatccgtgacaacattgcccttagcagccggcacgtctagatacggtccccaagcgccgggcccttcatgaattgataaaccgatgccatggcctgttccgtggccaaagtacttcccataaccagcatcattgattgtgttgtgagctaagtcattgatgactcggccaagaacacctggttttaaagctttttgcactttttgattcgtttgatagacaatttgataaatggtcttcagcctaggatctggttcgcccaccgcaaacgtgcgggttaaatcagacatgtatccgtggtagatacacccccagtcaagcgtgacaatatcgcctttttcaattttcttctctgttgccgcaccatggggcatcgctgagcgcgtcccggaagcgacaatcgtttcaaaagaaacattgctggcgccaagtccgcgcatgaagaaatctaagtcattggcgacatcaatttcacgcatgcctggtttgatcgtagcaatgacatgttgatagcccttttcggcaatagcgatagcttgtgtgattgacgccaattcattggcatccttgatctcgcgttgcgtttcgacaaagtcacgggttggtactaaagttccttgtgtgagcaaatcaaatgcttcataatcggcataatttaagtgaactgcttcaaaaccgattctagtcaattgtaagcgattggccagcttgccaacggccttaaacatgctgtcctgatgcaaaatcatttcagcattatgtacttgctgcttaaactgttcggtaaatcgcgaatcagtcacaaaataagccttttgcggggttacaagcaaggtgctttcttcacctgtaaagccggtcaaataagtcacgttcttcgtatcggtaacaaaaaagccatccagctttttatcctgaattcgcgcctgcaatgctgtcattcgatccatccaaatcgctcctttactgactcatgctttgttttctctgaaaaaaagacgccccgttaccgggacgtctagtctttattcagcagctgctgccggataaactgaaaccttcttcttgtcacggccgaagcgttcaaattttacaacgccgtcagcagtcgcgaacaaggtatcatcgccgccgcgaccaacgttttcgccagggtgaatcttggtaccgcgctgacgatacaagatattgcctgccttaacgaattggccatcggcacgcttgctgcccaaacgccggccagcagaattacgaccgttggatgttgagccgccacctttatggtgagagaagaattgcagattcatctttaacataacgtacacctccgaggattaattttgttcaagttgtttagtagtaatcgtcaaacgatcaggatattggtcttggatgctctgtaattcgagcaataaattttccaacagaatctgactgatgtgtagctgttcgccggtaatggcggttttaattgccatctggagatgcccaccatggacttcatccgcaatgacatcaggttcaaaccctgctaagccttcaatgccgttaacggcaccaatgctcaccgcagaaacagcggcacatacaatatccttaccggttttaccggcatcggcatgacccgtcaacgagaagctgacgatatcaccatgttcatctcgatgaaaaattgccttgatcataactatgctgacctcttaagcgttgatcgcgtcaataacgaccttcgtgtatggttgacggtgacccttcttttgatgagagtgcttcttaggcttgtacttgtaagtaacaacctttttctcgcgcccttgtttttcgaccttgccagttacggtcgcgcctttgacggttggtgtgccaatcttggcgtcaccttcgcctgcaaccatgatgacttcatcaaaagtaacttgtttgccttcgtcagcgtcgagtttttcgacatagatggcttcgccaacctctgccttgtattgcttgccgccggttttgataattgcgtacactgtgtgcacctcctgttttgcctttcggcttttcccctgaagactcgccaagttgggtgcttacgcttaaaaacccaacattgtgcggttgcataggaggggtgccaaatacaacggactaatattaccagagacgacgtcaagttgcaagacaaacaacaagcgcgtagattcgtgcgtttagaaaccggtatgtcacaaaccgtgctgctttttaaacatgccaccttcaagactctcatatgtgtgcttctgggctagcgaacgcgtttcaatcaaaagttgaaagccacggcaccgccttcagtaatcacgttttaatctagaaaccatcaactgtgcctttttcgaaaaagccagacaccagcaatgactgccagcatgtaaaggatgtatatcatcgtaaagatggtcatccaaccaccaagtgcggcattaattaacagtaaactaatgactagaatagcatccacaatccaattgaccggttgagccaattgtgtggtcacaacgatcagcaaagcaccggtcacgagaagaattaaaaggttaagtaatataatgataagctgtcacctccttgaagaattatatacgagccatcttctttcaacaagaaatcgtttaattgagcagaacggcaaaagaaaaaggctcagaaaagatctccgagcctgcccctgccaaggacctttaatataccatagatgcccgcaattattttactgaatttttgaattttggcggccgcattgtagccaacaaccccttacgctatcacttaaaacacgattgctgaaaagaaatggtttgttgtaggaaaagcttccaaatattttgactcgtaagcctttgaaacgacggcacaaaaaaaagccactgattgttcagttcagcagcctttagttacttcttcaattgttgtaacgctttttcgatcgtgttgccttttccaatgtgtttagcattgcttgagtcaatagcgataaattcttgcgtcttcatgttgagttggattcgatatgacatcgtaatccctccattctttaaaaaatagtttgaatggtctcaggtagcgatgaaggctatactactcactttttgttagtatgtcaagcattaaaaaacacaacgattgctaactgacttgcttttgacgggataaatcaagatagcaacgctcaaaccggctttaactaatctgatttaaaagcaatttagccttggtcatggcctcgtcgtacgtgccatcggtcttggccggtaactttctgatttgatcaagcaattcgcggccttgaatgactaacgcttcaatatcagcatttgtatcactcaaaaaagaaacaattaagtagatgtttaagactttggtggcatcctgatcgcctgcgattacctctgcacctaactttttaatggccgttttcaaatttcggacttttctctgttcttttttacgcttgtgataataaggcaacacaaacggtaagaaattcagataaacccgcaccccactctgaaactggacccatttccatcaataaacaccttcattgtcgtgactcatgtcaacatttcgaactaacaactcgtagatacaaaaaaagcctgatgcattgtcctcctgcttagtcacggatagcccgtcgtcacagcaatgcttcatggcatttgtaagttttatgtaccagccgggattcgaacccgggacaaacggtttagaagaccgttgctctatccaactgagctactggtacaaatcgttattaagtatacgagaagcgcgacaggccgtcaacgggttctatgaggaagatcatccgatacgcaagttagacggatatagttgaaagcagtcaatgagaccgctacactgaatttatcacaattttctcataaaggaagacaatgctgatgaaattaaatcaatttgcccgtttgacacctgacttcaaggtgcaagtagcggagcttaagcagattggcctgcaagccgatcctgatgacgcttttagtcaaagtgcgaccgaccttttcaatgccttttttccagaggcttatactttagccgcaaaggaagataagctcgcccaagtagcagtcaacatggaccaaacactagcagcatggttggcgaaaaaaccatccaaaatgacgcgccgtgacttttataatgtggcgctacaactacttggcttcgaagctttcactgactttgacctgaatgatccctttaaaatgatgactgcaaccaagttaccaagcctcgatcacgatctaacgagcaccgctgatttgctcaaggctgtttatctattgttaaatacgcgaaccaagcatctggttagttatttggatgatctagctaatcgcggttttttaaaggacttccagaaaaaacagaaaaaaccgacccaccttctttttaacggcaaagtccaacaagtttttgatgcgcggcaggcggttcgtgaagttgtttggatcgaatcggatatggataccgatcacgatggccaacgcgacttgctcgaagcgactatttaccgcccgaaagccacagatcaagggcttaaagtgcccgtgttatttactgcaaatccgtattttcatggaaccaacgatgtgactgcagtgacgcacgtgccggaaacgaccttagctgttaaaacacacggagcctcgaaagctgaagttacggcaaatcctgaagagcctgccaacttgcctcatcatccagttaatggcgaggcgacacaggccgaagcttatgccgaagaaaacagtatgtatgcctttaacgattattttctcgcccgtggctttgctgtggtttattcggcaggtgttggcactcgctattccgacggcttccggacaaccggtggcccagaagaaaccgatggtgctgttgctgtcatcgagtggctgaccggtaaacgccgcgcttttacgaaccggacagatggtattaccatcaaagcttggtggtcaaccggtcttgtcgctatgaccggcaaatcctacctggctacattagccatggcggcggccaccactggggttgacggtctcaagacaattgtagccgacgctggcatttccagctggtatgactactaccgtgaaaatggtctcgtagtggcccctggtggtttccagggtgaagatgcggatgttctggctgtggataccttctcccggcaaaagtccggcggcgacctgatcaacatcaaacaagcttgggaaaagcatcttgctacgatcactcacgatcaggatcgaacaactggcgcttacaacacatggtgggatgcgcgcaactaccggaaaaacgctaacaaggtcaaggcagatgtggtgttgatccatggtcttaatgattggaacgtaaaacctacaaacgccatcaagttttgggaggccatcgcagacctgccaattcaaaagaaactggttttgcatcaaggccagcacgtttacgtccacaatgttcgctcattagattttctagatatgatgaatttgtggctcacacatgaattgcttggtgaggcgaatggcgccgaagatgtattaccaaatgttgttgtgcaagataatgttgctgttcagacttggtcggcctatcagaattttgccagcccagcagcagagcatgtgaccaacactcgcaatctaaaaacggatttcgaggcggccacggatcaatttaccgatcacgcaacagcaacttttaatgcccagcatgataccagtgccagtttcgagactgccatcatcacccctaacagtgcttatgccaatagccgcttgtggctcacgcagccgccacttgagcgcgaccaaacactggaaggcattccgcacttagagctgacgctggccattgataccccaacaggtattctcagtgttcgcctcattgatttaggaatggccaagcgattcggtgaaaccgcggcaacggtggccttaaacggtcttcaacttggttttgattataaaacaacagacattctcgaattcaaaccaacggctaaaccgacaccaagcaagttgatctcgcttggccatatcaacctgcaaaatccaaaaaatgcttacgaagtgcaaaggattacgcccggccaaccgttccatatcagtttggatctccaacccacccactatcatctgccagctggtcgtcaactcgctttggtcattcatggggcagatatggcccaaaccattcgcccgatcaaaacaactcattatcaaattgatttggctaatagcagcatcacgctcccttaccgcatttaacttaataggatgctcaccagttttttcatgcatgatgcatcaaaaaaggagatatcaagcgccgagtcggcctgacatctccttttttcttacttaactgttcaatcaacttgcttcaacggtgacagcaacagcttttgggttgtctggtttagtaaagctccagatattgttgccgttcccattcagaaacctgctgacgataagcggaccattcgaggttctttgagtccatgaaactttgatacaaatgtttacccagggcagccttgaccacatcatcagccgctaatgccttcaaagcattgtgcaaagttgatgggaggtcttgaatatgatttgctttccgttcatcgtcttgcatccgataaatgttgcgatcaacggcttcttccggcttcaatttcttagtcacaccatctaaaccggcttggagaatcccggcgatggctaagtatggattagcggttggatcaactgaccgcagttccagtcgcgtggacaatccacgagattgtggcacacgaatcaacggtgaccggttcttgcctgaccaagcaacataaactggcgcttcaaaaccaggaaccaaacgcttgtaggagttcacagttgggttattaatagcggttaaagcataagcgtgacgcagaaccccggcgagaaaatgcatggcagtttcgctcaactggtcatccgtattggcatcgaagaaagcattgcccttgtcatggaaaagactcatgttgatatgcatcccactaccgttaataccgtggagtggttttggcatgaaggttgcataaagcccatgcttgcgggcaatcgttttaaccacaagtttaaaggtttgaatgttgtcagcagcttctaaggcatcagcatacttgaagtcaatttcatgctggcctggcgcaacttcatggtgagaagcttcgacttcaaagcccattttttcgagttcaaggacgatatcacgccgacagttttcgcctaaatctaatggtgcaaaatcaaagtaggagcccttgtcgttcaactgagtcgtcggattgccattttcatccatcttaaacaggaagaattctggttctggtccaatattaaatgaagtaaaaccagcctccttcatttcgttcacgacccgaatcaagttattccgtggatcaccagcaaaaggactgccatcaggacgatgaacggagcagatcaaacgcgcaatcttaccgtgatcgttttcccaagggaacaataaccatgtgtcgagatccggaaacagtagcatatcactttcttcgatccggacaaagccatcaatcgaggagccatcaaaggtgatcttgttattgaggaccttctccaattgagaaattgggacctcaacgttcttaacgattccgttaatgtcagtgaacatcaggcgcaggaacaaaacattttcatccttaacagtctgacgaatctcatcagcggtaattgtttttcttgccatatacgtgaactcctatctttagtgtgattggcggaaacctatggctggaccgggatcgggactctggttcagtcgactctggtttaacaactcgtctcgcagtacttgccgcacttcggcatcgctgtcttcatgatgtcggggatgcttgagtcgctttacgtcggcaagcgtgaaaccgtctgccatttgactgcgaatctcaagcaattcattaacattattcagcgagtatgtccgatgattaccagcgtttcgtgcaggttgaaccaacccttgcgcttcataataacgaatctggcgcgcggttaaatcagtcaataacatgactgtaccaatcggcagaaccgatcgcgttctcagatcagcgatctcagccataggcatcctcctttacaacaatgtcaggttatcaaaccatataaggcgtgtcaacggcagatgtaagcttttctgacattcaaataaaaagataccctttttttgttttcaaaatgaagatgccatagaccaataaataaaaagacggtcatcatctctggtaaagcgcaaccgtttccaaccgctatgtcgctatcatcccaccaccaatcacatcatcacactgccggctcagactgttggcacgaatagaaggcatcgaagacacagtctttgaagtcactctaaaaattttccgtttaacattatgttaaaatcaactgaatctattttgaaaggaactcgcaggcatgcacttatatatcggctactcagaaaaagtagcagcaaggatactgcccaccaattggcgttgtttaactgcggcaccgttagctgcctttggcgcagcaatcatcgatgcttctgacactgcaacgctcactcagcttgtggccagccaattacccttaccaacttttatcatcggccagataccaatcagtcacactggtcagctgacagtcaccaacatcgatacacttaataccgcaataatggctcagattactgctgctgcacaagcttatgagcaaaccatggtaccagcattcattcgcgacttactggactatgcgaaggcggacccaaccagctttgcgactcctggccaccacagcggtcactacgacgacttagcaccagcaggttacttacttcatcaggcttacggcccaactttcttcgctagcgataccagcgatgtcgtcacttctttgggcgatatgttaacacatgggggcaccccgctagctgccgaagaagcgaccgcgcagttatatcatgccgatgaaacttattttgtgaccaacggcacgactggatcgaataacattgtggccagtgcattgctcacgccaggcgatttggttttattcgatcggaataaccacaaatctttttataacgcggcacttgtccaaaatgatgcccgcccggtttatttggatacacttcgaacgaaacgtgggttgattggtccgatcgatttacagaatctaacccatgaaagtttgcgacaaatggcggtagcggtggctcccgaaaaggcacatcaatcgcggccatttcgactgacaattcttgaactagaaacctttgatggcattgtgccaaatgtccgtcagttaatcgatctttttgggcctttaaccgactacattgctttcgatgctgcttggggtggttatgagccgtttattccagcaatgacgcccatggatcccctgcaggtaccgcttgcgccgactgaccctggtatcatcgtcacccaaagtgtccacaaacagcaatccgggtttggccaggcatcacagattcataaaaaagatgcccatattaagggacaagcgcgatatgtcggtcacgaacagttcaaccacgcgtacttaaaacatgttacgaccagctacaattatccgctttacgcgtcattagtcgccaacactgccattaatcaaggtgctcgcggacaaaaaatctggcaagatgccattcgagcagcactcggctttcgccgctcgctcaacgattcgcgactcttttctgcttacgaaccgcctgagttgacaactttgcctgctgatcaggccattcagactgctgaggcttggtccatgacgccacaagctgcatggcatcaactcgcaggccttcaacctgatcaagcatttcttgatccaggtaaagtgaccgtgctattacctgacacagccgcatttggcatcagcggttggttagtagatcgttatttacttgaccacggcattattccggaaaaagccgacctaaatagcctgctttttttagtgacgccgggaaccgctcgaacagactggcaacgattgcgccaagtgttagcccagtttgaaaccgattattttgtaaataaaaccgttgctgaaagtttgccaaaattagtcgctgaaactggcgaggcgtatgcacatcaaacattacgcgaactaagtcagaccatgtcggactttttccgagaagcgcacctaactgagcaacaacgtgacttgtttaccaacaccaacgccatccccactgccatgaccccgcaagccgccgatcgttattttgttcgcggtcaaattgacaccatccctctggagcaagccacgggccgtatcgcagtcgacggcgcgctgccctatccgcccggaatctttgtggttgtccctggcgaacgctggcgaccggaagcgatcagttactttcaaacactttttgaaggtatacggcacttccccggctttaccccagaaatccaaggcgttatcgctcgtgcaggtggtcagccatatgttcatgttgtgcatgaacaactttcatagccgtcaaaaaacgcgatcaattagcttgatcgcgtttttttgcttagcctattctagttatcaaagaaagtggactgcgcggctcccatggtcgccaatttaatatgcgcataggttagcccgccttgcaggtataacgtatatggcgggcgcaacgggccatcaccggaaaattcaatcgttgagccagcaacgaatgtgccgcctgccataatgacttgatcctcataaccggccattttttccggaatcggcgtcacaaagctgtcaactggcgagtttgcttgaacagccttagcaaatttcaccatgtcatcggcattgccgaagttgactgtttgaatcaaatcggttcgcggtgcatcccaagcaggtgagacgtccagccccagtttagcaaataaggctgcttcgaaaatggcgcctttaatggcattccctgtggtttgcggcgaaatgaagaagccttgatacatgtcagccaacgcaccgactgtggccccttcagccccgccaagacccggtaccgtgaaccgataactgatgcggtcaatcagatcctttttaccgacaatataaccgccagttttggccatgccaccgcctgcgtttttaaacaacgagccggccatgacatcagcaccgacttccaatggttccttggtttccgagaactcgccataggcattatcgacaaagatccagacattcggcaaaacactgcgaacaaccttgatcatcgcagcgatctgatcgacggtgaaagaatcgcgggttgcataaccgcgagatcgctgaatggcaaccactttggtcttatcgttcaaccgcgctttgacagcatcatcgtctaccgccccgtttggcagcaggtcaacataatcaacaccaatgccatattcttgcggcgcgccaatcccgttgccagctaagcctagtacttcctgcagggtatcgtacggcttaccggtgatgtacacaatatcgtcacctggccgaaccaagcctaataaggcaacgccaattgcatgcgtaccagaaacaaattgcggccgcaccagtgcatcttcgccgcccaaaacatcggcgtagatggcctccaagacatcgcggccttcatcattatgaccataaccggttgatccggttagataactttctgccacatgatggttttgaaaacttgttaaaaccttattctgattctccaagatgcgcgcatcaatttttgccagttgtggcgcgatctgtgcgtcaacttctttaaccattgtctgtaattttggatcaaacttatccatccaactcatgatacttttctcctttaagtgagcgcgaacaggcgcgtttagaaatcggcgcatagatgggcgtcaaccagatttgctcgaaactgaacctagccaatctggttgacggccttcatatccaaattgatacgactgtattcgcgttaacgttgtttaagccactgttgcaccaacgtaacaatggcatttttgtcttccggatgcgcgaccagatcaaaccaatgggtcggcatctgattgcgaaaataggtcagctgccgtttagcaaaatgccgggaatgttgcttaatcagtgcaacacaattcgccaattcagcctgaccgtgaagatatggcactagctctttgtagccgatagcctgcatggcctgtgcatctgctggcacggtttttaatagctgctcaacttcagcgagtaacccggcctgcatcatcgcatccacccgtgcattaattcgatcatacaaaacggttcggtccgtggttaagccaatgaccaaggtcgagaacaacggctctggttgtggctggtcagaaaagcgccgtccggttaattcaccgacttctaaggcacgaatcacccgccgcgtattggccggcgcaatttgttgcgcagcatctgggtcgcgctgtgccaattgctgccacaaccatgattgaccgtttgttgctagcgccacctgccagcgctgccgaatagctgtcggcggcgccttcccgcctaaaggcagatttaagcgcaaactattaagataaaaaccggtaccgcctaccagaatcggtaattgttgccgatcagccaccgtatcaatcatggccgtcgctgcctttttaaacttggcgaccgagtatgcgacggtagggtcagcgatatccaataaatggtgtggcaccccttgcatctcttttggcgtgattttcgccgttccaatgtccatgtggcgataaatctgataggcgtcgccgttaatcacttcaccgtgtagctgctgggctaaataaacgctgaggtcactttttccaacagctgtcggtccgacaatcatgacaatccgtttggctggtttatccatttcattaagctccgatagtatagtataataaaaacagtatcatagatcattaatcaggggggattttcatgaaacataaatttgctcgtggcttttttgttggcacgctaatgacccttggcgcaattgccggtagcgtttttgcctttaagaaaaactatatcgaacctgtggaaactaaggtcgatgaaattaacgataaccggcgtaaagctaaccgtaagcgtttctcagctcatcaaggttaagcaacaccagctgttaatagcggtatgttcataatgagcgccgctatcagcaaaaaagcaatcgacaagttcgattgcttttttcttgcgcttatgtagcggctaatagttagtcgggctcttttttgttttgcctgaccagttatcatagccgccttttagccaactgattttttcgaaaccattcttgcgtaaacgccgagcagcacgcaaggagagcacgccagttttgtcatagagataaaccggcagatcttgacgcatttcacccatccgttcacgcaactgcgtataaggaatatcgcgggcaccgagaatatggcccgctttgaattcgttacgctcgcgtaagtcaataatctgtgctttacgcatggtatgttcaaagtcatccggcgtgatctcgccgccgatagccttaaaccgtgatttttgatagtaactccacaaccagttgaaaccccaataaatcagaaacaatccaacaaaaattaacagataagttaacacgtgtatgactccttcttccgcttacttaagtgcaaggctggcagctccgataacgccagcagtgttacctagcgttgccagacgcagacttgttgtttcccgaacattcgggaacgtattttccttgaaatacttatcaactcgcttcagcaaaaagtcgcctgctgctgaaacgccgccaccaatgacgatgaatttcggattcagcagattgccgacatttgccaatgccaagccaagaaagtagctaacccggtcaacaatcatcaacgcaagtttgtcgccggttttggcaagatcaaaaacaattttgctagaaatctcatcgccatcatctaacgtctgcttcaatttggagtcgccagcgaattcttcagccatatcccgggccacccggacaacgccagtcgcactggctacagtttcgagacaaccgcgtttgccgcaagtacagagataaccattcaccggatcaacagtcacgtgtccgagttcgcctgctgagcctgcaacaccatgcaataagttaccatcggcaataatgccgccgccaacgcctgtgccaagcgttacgaaagttacattggcgtcattttcgccagcgcctttccaacgttcgcccaaggcagccacattggcgtcgttatcaatactaaagggaatcccagtaccagcctcaatatccttcttagcctgctgcaaggttttccaattcaagttgtaagcgccaattaccgtgcctgcttcaatatcaactgaaccaggtgagcccataccgataccgacaaaatcattcggtgtcatgttgtagagtttgagatgttcgttgatcgaatcaatgatatccggcaagatgtgactgccttcatccaaaatattagtatcgatactccagcgctgttgaatctcaccatcagtggttaagatcgcgaatttaaccgttgtgccgcccaaatcgacaccaattaattttttgtcattcatttttgtcattcctccgtttttcggcgggcagtggcagctcatgatttaaaggatgtgcctcttcttgcgcgtgtgcatgccgcagcacgacttttgcattcaggtaaaccttgtcatcaatgagctgcgctttgtgcagccgatctaattcaagtgcagccagttcgatatcccactcacgcttgccaacatgaatgaacgtaccaaacccctttaataattgcagaacatcatagtaagttttcatactagcctgcgttaaatcctaagaaaagcaacgcgcccagtccgaagagcaaggtgacagctgaagcaatccgccgcggtgtccccatgcgaccaagtgccggagcacccaacatgcctgctgcaagaaagccaccaagcaaaccgccaatgtgaccaaaaatatcaatgccgctggaaaacagattaaacagtaagttcaagccaaccaacagtaagaattggcgcgccaactgacgaatcactggattttctttgaagctgtcgccgagcatcaagcaagcaccgagcaaaccgaaaattgctgtgctggcacctgccgcaagtgtgttgggactaaaggcaaaactcgcgacattaccggcaaaacccgaaataaagtacaacagaaagaatcgccaatggccaaatagttgttccgtcatttgtcccaaataatacaatgagaaaccgttaaccagaatgtgcattaagccgatgtggacaaatactggtgtcatcaatcgccaccactgaccatacaaaatcaaaggattcagccgcgcgccgtagaaaaccaacacgctattattggtactgccaccagagaaagtctccaaaaggaagaccaaaatggtaaccgctaaaatagcattggtcacataagctgaattttgcagccgagagcgccagtttgaataattcatagtttcctttctaacccatctgccaagcagacaggaactgcttgccgtatgccgagcctgccgcaccaatccgctaaaaaaacaacaggtccgcctgttgtttttcgcaccgtcagaagcgttggccaaacacttggcggccatgttcttgtagtagtttagcattttttgcacacgctgccaacacgatcagccgttaactgtcttctgatgaatcgaataatccttatcttctttgatgttgttcatctgatagaagtcagtaaacatttctttggcaatctgcagttgataaggcgtggtggtttcagccttcagattcgggataatcactgcaatcgcaatctttggatccttcgctggtgcatacccaacgaaactttccgtgatggtttcagtgagcgctgaatctttggactcacgagcaaacccttgagcagtcccggttttcccggcaacgcccggattcaaggtattcagcgaagtcgctgtagtccaaccgtttgtgccatgcacaacctgccacattccttgcttaactaggttaatctgatcttgcgtattgtcgatttttgaagtaacggaaggctgagttgaggttaacaccggaccgctactgccatcgctcagtgtttggctaatactgttcactaagaatggtttcatccgataaccgttgttggcaatggcgctgatatactgcagcatctgaataagtgtgtagttatcatagttcccgtaagacaaatccaacgccgaaccgacaagcaaattgcctgatgaatcatgcgtattgccttctaaccctgcaatctcaccgggcaagtcaatcccggttttgagacctaatccgaattggttaaagtagccgcgcattttgctaaaaatatccgaattcaatttcagataattatttggcgagtatgcatagtggccttctttcatggccagccacatcatgtaaatgttactggaaacttccagcgcagaggctgcatccaatgaactgaaggtaccgaccgggtaaacagatttcttgactggtgtaccaggcaagtaaatcggtgtatcagcttgagtattagaattgacggtaatcacgccgtcttgcaaggcgcctagcaccgtggcacccttaaccgctgacccaacaacaaatgcgcggttgataacgccaagtgcatcatcttcaaccttatgtgtctgaacatcctgatgctgacccgccatggcgaggatacgacccgtatttggatccatcgcaaccgcgtaagcaccgtctgacaagctgcccgcaccagcagatcgaatcgaactgaaggtgtcactcaaagacttttcgactttcttctgataatccgaatcgatcgtcagattcaaattggcgccttgttgccccttgaacttggaaacagattgaataatctggttgttattcccgatttcaacctgcgtttgactcttggaacccttcagaacattttcatatgccttttcaaggtaactggtgccgacccggtcattccgagcatagccatttgccaaatatgcctgtagttggtcagctggcaaccctgacttttcgttggaaacttgtccaatgattgacgtcatagagtcaccgttcggataagatcgctcccagtcagtcccaaggttcaccccaggcatctgcgtcaagcgctcaccgacaaccgcgacttcatgtgccgtcacgtcctgattcttaaggtagacagtcgatagctgagtggcgccattcataattttgtaaaggccggctgcttctttttgagtcgccgtaaaggttggcatgtgttgacgcacgtaagcgacctcatacttgtacaattcgtcagctttgtctgtcggcagatcttgaattttctttggcagtttggaaacaatctgttttgaaactttcgttggtgccaaatagtagtcaatataatcgcgcttggtaagattgtcttcaggcttgtcaataagcttggcaagctgattagcaatgtcatacatctgctgcgatttagccccaacactcttagtgtaagtgatggcattattcgccttattcgtcactagagcacggcccttgctatcaaaaataagcccacgaggcacattgccggtgaccactgttttgttggtgcgatcgacttcagcagccaaccgcgggccatttaaaatctgcaaataagccagctgtgcaactaaggctgccagcaggagaaacgcaataaaaaataataaatttaagcgaaacggaatttgactcttgttccgtttgggttgcggtgtacgaatgtacttcacctaaaattgctccttcagaatttctatcttataaagtgtagcaaagaaccagtcaaaacgccatgacacgtgtcttatgatatgcttgagatacggaagacgacacctaaaatgccggaattaatcttattttagaagttggtggacacttgtgcgacaacgttggttgaaaaattatccgctgatcctcagttttcttttaccgggactgctcgtcggcctttattttgcaatccgtggcacctttccatttggatcaagcagtgtgttgacagtggatttgggacagcaatatatcgatttcttcgcttacttgcggcaaaccttgctcggccatcctggccaacttttttatgccttcaataaagcacttggcggtgacatgtacggggtctttgcctactatttgcttagcccattcaactggctagttgtgttgtttccagcagatatgctggatgtcgctgccttcttaatcacggtgttgaaaatcagcaccatcggcttcaccatgggttggtacgctaaacgtcacgccatccacggcatgatgattccggcgtttgggttagcctatgctttgagtggctggctgttggccaacagctttaatttgatgtggctggatgctgcaatgctactgccgctcattattgacagtgttgaaatactattcaaaggcggccgcgttatggcctatattggctggctcgccgcggctctcatcattaatttttataccggctatatgattgccttgtttttaatcctgtatgccatttactggctcattgcccatacctcaacatggcagcatttttggcgatctggactgcggtttatcggcgccagcgggttagctgggatgatcagtgcggttgtgctattgcccacctggtttcaactgtcccagtcaaaaggcacttacaccgtggcgacgatacgttggcgctttgaatatgcgccaacaaggtttttgagtaaaatgctgccaggcagttttaactttgaccaaatgccatccggttatcccaactattacattggtgctttaggatttgtactggttgtcctctttttcctatccaaaagtcatccttggcgccaaaaattggcagcggctggcgtgacaattgtgttaatcctatcgtgcatgctagaaccgcttgacttactgtggcacggctttcagtttccggtttggtatccataccggtttacatttgtattgtgcttctggtttttgattctgggtatcgctgtcctgccgcatttacaaattggcattcctttgcaatggttaggcgttctgctgcttgtgttcggcgctatttacattgatgtcgctgccaacctcaaacacttcagctttctgaccgtgggccacttgctttttggcgcaggctgtctgctgctgacttttgtctggtttagtttggacaatcgccggccagtctggttcggttttgcgatcgtgttaattgacttaagtggcagtttaatcctgacgcttaatcaactagcctatttgaatcacagtgattaccacgattataccgccgccttgattcgcgggacacagaccatccagcaacatgatcccggcttgtttcgagttggaaaaaccaccattcgtacccgtaatgaccccatgacggccaattatctcggcgcagaccaatttaactccatgttagagccggctgtccccaaattcttcggtcagttaggacaacctgaagacgatggttcggtggcctacacaaatggcactttaattacggacagtctactaggtatgaaatattatctgacgccaaccaaacgtgcggcaaaaaaactgccagatgccggtcaacgaccagatctaaagtggtatcggccaatcaaaacgacgcctacttggcaaatcctgcgatcaccttttgcccaaagtctgggctttgtagccgatactgatttgctcaaacaaccactctatagtgaaaccccgcttgccaatcagtccttaatcctgcaatcagccctcggcaagtcgggcaatccttattttacgccaacagcattagaggcaccgcaactcaccggtgtgcgccgagtctcaactggcagcgcacccacttatgctaaggttggtcacggtccccacgatgtcacttatcgatttaagccaataccaggtaaaatctatgtgttaaccctcggcagccagttcgctgaccatttagtgacactcaatcaaaatgggcaaactgtcaccttgccagatagttttaacgataccattacggtcaatgtcaccccccgtaatcctaaagctgaacaagttttgcggtttcgcctgaataaaaaagacgcctggtttgaaaattttgacttatatcaagctgacgccaagcaagttatccacgatcttaaaaaactgcaaacaggatcttggcatgtgatacaacacacggctaccaccgttgaagcgacgatcaacgttttgcacgaccaccaaatgctgcaaaccacgatcccgaccgcccctggttggcacgtgaaaattgacaatcgacctgtcaccgtcaaaaaaagtttaggcattttcatggccgtgccgctaaaacctgggcaacacgtgattaccatgcgttacgtcccgccattattagggtggggtgctgtgataacggtgactggcctatgcttaacggcttgttggtatgtcgttgataagcggcgcttctcgcgacaccttgtttcgcgacggtgagatatccgaagttatttgaccgaccattgcaacccaaaagccagtatccgcacgtctttgatcgtagccaattgattggccgttacaatcaaaaacgcaggtatactggctttttaaatgcgctaattcatgcttgcctacaacactttctcagcatgcctaatgccactatagccgagccataaaagacgcgctgggcattaaagcttgccgaaagcacgcttattcttctttaaattcatacttcggctcatctaagtgcgcatcatagtcgactgtcatggcaagattttcaaagaaccatgcatcggttggatcaacaaaataagtgacgccgtctttttctactgccatgattggctggtcaggatgatcatcacgtgtcatgccaacactaaagccatcatgaacctgagtcttaccatatgccttcccaaaaaaacggataccagcacccttgtctggcaaacttaattcacggtgaaaccaacgacttgcttcatcagtgatcgcgagttgcaaccccatcatctccttgatcattttttacgagtccatgtttaagtgcataaatagctgcctgcgttcggtcctccacatccagtttcgccaaaatgttggacacatgcgtcttaacggtttttagcgtgataaaaagttctgtcgcaatttcttgattcgacttaccttgcgcgatcaattgcaatacctcacgttcacgattcgttaactcatcatactgtggttgcggatgattcatgcgattcatcattttagtcgtgacttgcggctccaaaactcgctcacctttagctgtttgccgaatcgccttggcaatttcctcggctgtggctgtcttgagaatgtaactggccgcccccgcctccatggctggatacaccttggcatcatcaataaaactcgtcaaaataataattcgtgcttgcggccatgccttcagaatctccttggttgccgtgatcccgtctttcaccggcatcacgagatccatcaaaataatatcaggccgatctttaagtgccatatcgacaccctcttgaccgttttcggcctgatcaaccacttccaaatcaggttggacccctatgtaagttgccaaccccaaccgaaccatttcgtgatcatcaacaatcaatactttaatcatgcgcaacatcctttgataatggcaccctgacttcaacactggttccctgtccgaccacgctcaccactttcgcagttccgcccatggccgcggcacgttccttgatatttgcaagcccataattaccattactgctggcttgtttcgcatcaaatccgacaccgtcatcgaccatccgcaacaccaccatatcctgcagctgtttcagataaacttcaaggctcgatgccttggcgtgtcgtaacgtgttacttaaaagttcttgaacaattctaaaaagattatcttcggccgctggattcaatttaatatcatccaactgccacgtgatctcgattgtaatcttggtttgcaattctttcaacaattgaataatcccttgtttcaaagatttgccttcaagattagtcggccgcaaatgcagcagcaatgcgcgcatttccgcctgtgcctcattgatcaccttttggatcgtatccagttgtttgctcagttcagcctgcgcagggtcacgatcagccacactacgcagtgcagataacatcatcatcgcagcaaacaactgttgtgagacagagtcgtgcagttcacgagcaagccgatgccgttcaccggttaaaatggcttcttttgtttcaccggaaaatcgaaccggcgtgttgctataccgttcaatctcacgttgtaagcgtatcattttttgccgcaactcttcaagcaaggctgccggttgcttacccaaagcgccgactgcctgctgcgagcgactaaaaataggtgcctgatattgtccagcatttaattgtgccaatcggctgtccaactgactgtgcatgactcgctgccgccacatgacaataaccgtcgcaccggtactgatcaacaaagcgccgattaccagataaaccaaaactggtgcggacaggacggtggtcaataacacctgcaaaaaatcatgttcggttactttagctagcatgaaaaccaaacaggcctcgaccaaaagcgcccagaccagtaatgccataaaaaagccaaccagcatccgtcttctcatacagccagcacctccaaatcgccgacacccacactcgtaatgatgtgaatgcggcgcggtgcatcatcatagtcctttgaatatgccgtgacactttggctatgcagcatcgaatctttattttcaaaatgcaaggtaccataaaaggcagcgtgttcaaccgcaacaccaacgccaatcggcaccagaattcgcgttttgccaaaacctttgcgaatcatgatcacactatcgcctttaggtagaaacgtatcccctaaatcaataatggtatcgccagctggcacaaccatattaatgtcatcccaatcataggttggcgaaatcgtatgccgatcagtccacgagttaatcgtgcgcttaccggctttttcactgggctcctgagtcactggcgctacatactgtttgcgatcccaagccgaaaaccccatacctggtttcgtaatgaccatgattatgaacacacccgcgatcattagaatgagccaaatggccggattgataaaaattcccaagactaacaaaatcccaccaaaagccacattgaacgagcgcaaccgatgccatcgcgcaccgaggaaaagaaaaaacacgcccactaggatcgttgtcagtgccataggattcgtgatgatctggaaaaacagccacagggttaaagctaactcgatgcctaaaaataattgccagcggcgcacgacgatccctccttgtctactttttagcgtatacattgactcgatgtcgattcatttcaattaattataacgaatttcgttgcctttgacttagggcgtaaggctgaatttgcaacccaagatgtggctcaatcgccttttcacttttttaaagccacaaaaaacgacaaacgtcttctccttgatgaccggaaaagacatttgccgttgattgcttttggcgcaagttgacaaagcgttatgtgctgatcagccttcaactttggtgatcttgatcttcatctcaccaccaggggtactgatcgtgaccttatcgcccactttacggccaatcagaccttgagcgatcgggctttcgttgctaattttaccgttgaaggcgtctgcctcagcagcgccgacgatttcatatgtttcttcatcaccgtcttcttcaaatgtgactttcttaccaagtgatacttcgttcttagcaaccgcttttgaatcaataatttcagcgtaacgaagcattgtttgaatggtcacgatccgattttccaaggtggattgttcatccttagctgcttcatattcagagttctctgaaagatcaccaaaaccgcgagcaaccttgatccggtcgataacttctggacgcttctttgtcttcagttcctccaactcgtcttcgagtttctttttgccttccgctgtcattggatagcttttgtctgccataaaattcttacctcacttcttattttccttagtcactgtattaagaccagccgcatttgtcaatgattactcttgcaaaccgcgttcggccagaatggctttgatcttagtaaccagtaaatcaatggcgacttgattttggccaccttcaggcacaatcaagtcagcgtaacgcttcgatggttcgacaaactgatgatacatcggttttaccgtttttaaatattgattaataatcgaatccagtgaacgcccacgcgataccatgtcccgcttgatgcggcggatgacccgaatatcatcatcagtatcgacaaacaccttaatatccatcatgtcgcgtaattctgcgtcatcaagaatcagaataccttcaagaataatcacatcttttggcgccagatgaacggttcggtcagagcgattatgaatcgtgtaatcatacaccggttgatcgacagcttgccgatggatcaaccgatttaagtgatcctttaacaatggtgtatcaaatgccagaggatggtcatagttaatcttttttcgtgctgaaaacggcatgtcacttttcttgtaataagcatcttgcgctaataaaagcaatgagtgccccgaaaaatgatcaaaaatcgctcgactcacacttgtcttgccgctggcagaaccacctgtcacgccaatcacaatcggttttttctgctgcaccttgaaagccctcctcaaaactcatccttcagcccagaaacaaccgcataaggaccctggtcacaatgaccaaggtccttatgcggccaaagtccaattaggttacttatctgccgctgcattatcgctggcaaacttagccgtattggcatcatgttgttcccgtgttgtcgcgtaaagtacttcaccagttttaaggttagcaacaaagtacaagtagtccttgtcacgtgcatcagggctgagaaccgctgtgatactttgctcacttggcgagtcaaacggtcccggtccatagccggtgtggacgtataagttgtacggtgaatcaacgctagtatccttgttagtcagatgcgttttatgcgtgttcaatgcatacataacagagatatccgattgtagtggcatccccgcatcaattcggttcaagaagacgccagctattttgcgacgatcatcttgggtgaccccttcacgctcaactaacgatgcaagcgtcatgacttcttgaacggtgtattgctgcttcttaatgctcttgtagtaactctgcatcacactgtctgtcttggcaaccatcgcatccacaaggtccttgactgtttcaccagcgccaacgttataagtcgcagggaaaagatagccttccaatcgatagcgaactccttttgcattggccgctgaactcagcaattgcggatatttcttagccaattgattaaagaaggtttgatctttcatcaatgccagaaatttctttccggtcagatttttgttacttttcgttaacttatccatcgacgtcgcgatttgttcgatcgttgtgccttctttaactagcaattggcccgcagcagtggtggcactgccacccgcgcgcaaggcttgaatcaccgtgctcatattggcgcgttgtgtcaacttgtactggcccgcctgaaagtcggcgatattgtggaatttcacatagtaactaaaaacagtggcgctcttaatgacatgtttggcttccagctgcgcggcaatctgtttcgttgacgaacccgctggcaccgtcacactaatcgacgtcttgccatttggatcaaccggctcaagcgctgaacggacatagcggtagcccatcaaaccaacgatcactaggaccgccaatacaattccaataacccaagcaacgatcttgttggctgctttcttttcactagaacgctggcgccgcttgtcttgtcgatctgatgaccgtctatccaaaaatgttgcctcctctaaggttaacacggtcactggcacagaaatctgcacttaaggaccttgtccacaatggccaaagtaccggccatcgtgcccaaggctgcctatgtgacggtttctaaacgtgcctgtgcccgctctacttaactattctgaacaataaatctgaatcagcaaatattatacccaaccagcgacaaaaatgcgactgcatctagcgaatggcagccccgattcctgtctgtaacgccgccttcactttatcaaacgcctgcgtcacttcgtcttcagtcaacgtctgatcgtctcgacgataagttagcgtatacgccaaactcttctgacccgcggcaatgtgatcgcctgcataaacatcaaacaacgtcacatcctgcaagaaggcaccgccgtgttcatggaaaatagccatgacttgatcgttcgttacttgctcgtcaacttgcaaagcaatatcacgggttactgccgggaacttcggtgcgggttgcgcgattttttcctgtcgtggcgcggcaaatagcgcatccaaatctaattcaaaaacaaaggtggctggcaggtgctctgcatgttcaaaggcaggatgcaagcgccccaaaatgccaacaagttgatcgccgacaaaaatgtttgcggcctgaccaggatggagttcagcaacagcttgcgttgcttcaaagcgaatcggatcggccagcgaataatcacccagcaaatgtgtcacaatgcccttagcgtaaaagaaatcaacggctttcgcagattgatgccaatcttttgcgacaacattgccagtgatggcaccacccaaatattcaatttcggttggccgcacctgatcgcctgttttggtaaagatccgaccttgttcataaatcgcaacatctgtttccttccgcgcttgattatacttgatgacatttagcaaaccactaatcatgttcatccgcaaaacagcatgatcggtcgtcatcggtgaatcgactttggttgggagcccaggttgcagcttgaattgctcggcagcctcggcacttgtcaacgcataggtgatgacttgggtcagacccaatccttctaatagatgacgtgtacgtcggatccgtttttgttgcgaggtgtactcgccaatagtcatggttgtcgttggtaacgtacttggcaaattgtcaaacccatagattcgcgcaacttcttccaccaagtccgctttgatatgaatatcccaccggcgcggcggtacagcgacggcaaacaagccatcagattcggtcacatcaaaaccgagttgttcaaaaatctgcgtcacttgttgctgcgttaaatcggtacctaaaacatggttgatatgatcaagcgaaatatcgacgacaacatcttctgcagaaactgaagtcgggctaaccgttccctctgcaacctggccctcgcttaattcagccatccaagcaactgcagcatctaaagcacgattgatatcagccaagttcgtccctttttcaaatcgggaagaggcttcagaccgtaaattgtacttaagggctgttttacggacattgactggattaaaactagcagactcaatcacaacggtagtcgtttctggcgtaatttcagaattcaagccgcccatgacgccagccaaagcaactggtacctgcccattcgtaatcacaatatcttgatcatctaattcatgttcattgccatccagcgtggtcaaaggttcgccatttttagcgcgccgcaccacaatctgctggctgcctaacttggcatagtcaaaagcgtgcagcggttgcccataagccagcataataagattggtcacatcaacaatattattaattggacgaatacctgctaaccacaggcgtttttgcaaccacaaaggactttcttgaaccttcacatgatcaatgacacgcagttgataactcggagcgtctttggcatccttgacctcggcactcaaaaagtcgccgaccggacgatcaccttcagttaatggcttttcttcaaaatggggtttttctgcataagtagcgccaacttcccaggctacgccccgcatgccaagtgcatcagcgcgattaggcgtgatctcaaagtccaaaacggcgtcatgcatgcctaacgcagctaaggcatcactgccgggctctaatggctcgttaaagacatagataccattcaaatatggtttcggcacgacgttttcactaaaaccaatttcctgtaaggcacaaatcatgccaaggctttcttcaccgcgcattttgccttttttaatttttacgttatccgcaatgcgcgcgcctggcagcgccacaatgacagtctgaccggcagcaacatttggcgcaccgcagacaatttggcgcggcgtttcttcaccgacatcaacttgacaaagatgtaaatgatcagagttcggatgtggcgtagcacttaccactttaccgacgacaatctttttcaagccggcgtctggatgcttcacgccatcaacttcaatccctgttcgtgacactttatcggccagttcttctggtgaaaccggcacgtcaactaattcttttaaccattcatatgagacgtccatcttaaccctcctggctgaattgcgttaagaagcgcaagtcgtctgtgtagaaactgcgaatgtcgtcaatcccgtatttcagcatcgcgaaccgatcaggaccaaggccaaaagcaaaaccgccgtaaacgtcagcatcaatgttcgctgcccgtaacacattgggatgcaccatgccggcacctaacacttcaatccaaccggtatatttgcaaaccgggcaacctttaccgccgcaacgaaaacaggaaacatcaacttcaacggatggctccgtaaatggaaaataacttggccgcaagcgaattgtccgatctttaccaaaaacgtgttggcacatggccaacaaggttccctttagatcagccatggttatatgcttgtcaatgacgagtccttccatctggtgaaactgatggctatgagtagcatcgtcgtcatcacgtcgataaaccaccccagggctaatcattttcagcggtcctttggtaaagtcgtgcttttccattgtccgcgcctgcattggacttgtctgcgagcgcatgagtaactcattggtaatgtaaaaagtctcttgcatatcacgagcaggatgatccttagggatgttcatcatctcaaagttatagtgatcttcttcaacttctggaccggtcaaaacttggtaacccatgcccataaaaaagccttcaagatcgtccataatttgcgtgataatatgtggtgtgccagcctcaaccggatcaccaggcaaggtcacatcaacggtctctgatgctaatttcgcattgatcaccgcctgttcgagctgggctttgcgggcttcgatcactgcactgagatcgtcgcgaattttgttggcgaacgcgccgacttttggccgttcttcagcggacaaatctttcacgccgcgcaaaacaccggtaatcgggcccttcttgcccaataattggacgcgaatctgatttaattcatctaacgacttaacctttttaatggtgtcgttgttttgttggaacaattgttcaagtttggtttgaagatccatgttcttcctccttggttgctgacgtgagggttgatacaactttctgatgcatttgaaggcataaaaaaagtccctctcgaaaaagggacgaagcatcgcggtaccacccttgttcatggtcacgaaataaccatgcactcaacaaggtaacggctaggccggagctttctaagtgttgccacttcaaaagtcaactcagaaagtgaagacaaacactttgacgatagacgtcttgcagtcgtatgaacgtcattccctatctcgtcagcctgtttgggctttcgtcatcgtttttacgtctttttagataaactaagcttagcaaattcagcgccaacgtcaagtggtgattcgcgctagttaataaaaaatgtggtgtcatcacgctccctatgacttgtcgtttgctagactccgagtaagctttgaaaggaactagacgatgcagtccctaacctcggccgtgccaaactccgcaatctccggccagacggggctggaacgctgtgacggcgcttcgagaccgcaaagcccgcggtctcgaagtcgcctaacaacatcagcgacaagaccggtcgctgtgttgtttgctcggctgagccccatctggcctacgattgctccgccttagcactgaaattttgaaatcctgtatcaaattgtctatgagaaacgaaagacgaataattttccgcatttggaaaaccattcgtctgcatttgatacttttggattatgctgaatccctacttctcgttagcgtggcattcagcatctgtgacccatgcatcgccccatgcgtgtgcagcggccataactgaattgaggccgcggcctttgtcagttaacgcgtattcaatcaaagctgagtctttgtgggtcaagcgatccacaaggccttcgccttcgagttcctttaagcgttcgaccaagacccgatcggaacaccgcgggattaattgcgcaatgtccttaaaacgggaattgccattgtttaataaaacttccaaaatcagtccgttccatttctttcctaagatctcaaacgtatgttgaaattttggacaaagagcgacctgctggctttgacaatcggctgtactggttactgttgcatccactctactcacctcataattcccattcacttacatttatatagtgctagaataccacaatgtgaaaatattacaagccagtcctcgagaaacgttgaaaaatatggcaaaactttccagaaaaagaaccacggcattcatccgtggttccaatcgtccttcacagccaaatagctgctaaaactttgcgatcctaatttaaagcctttaagtgagtgtggatcggatgccggagcttgtgcatccatggtacaacgacttcatccatggcggcataatcatcgacaagtgaaacaacgaaactttccttatactttggtaagccaaccgttgcgccccacatgtgtttgacgataatgtctttttccatcggtgacaattcagtcagcttttcagcattccgcaaagcaatccgtggatggatgaaggcatgagtccccaagtcaaacttggttttacgccaatcgtagtaaaacaggtcgtgcaacaagcctgcccgggcgatcgcacgaacattcaagtgcagccgtttcccaatcagataactctgataagaaacactgatcgagtgttccaatcggttagaataatgatgttgcgggtgttctgccagtcgctggacttcgggtttggccaaaagatccgccacatacccaacgtactcagcatccgattgccaatcgcgttttttgctcaagacatctgctccttttgtggtttgatgaacacacttatagtataacaggttctaaccagaaaggtcacgtttgtaagggattcttaatccccgactaaatgaaacatcatgactgctgcagcaaccgccacattcaatgattcagctttgccccggatcggaatgtaaaggttcgtatcggtattttgtaacaaaactggatccatgccattgccttcattgcccacaattaaggcaaatcgttcgctcggttgaatgctatgataacttttagctttttcatttaattctgagccataaactgggatgccgccacggtgtaaggctttgataattggcattaatttagcggagacaatgcgcacatggaattgactgccttgcatcgcacgtaatacttttggaccgaacgcatccgctgtcccattaccgaagaccaccgtttgaatcccagctgcatctgcagttcgcaccaaggtcccaacgttacccgggtcctgaatcgcatccaacaataagaactgaccactcaatggctctggcaattgttctgcgcggcgcggcatcacagcaaaaatgccttgcggggtctgagtgtcgcttaaatgctcagaaacggattcagaaatctgtgtgattttgtcataaaatggcttgagcgcacgatcttcaacatacttttcggtcgcataaatatcataaggggtctggccactggcaagtgcttcttggaccaagtgacggccttctaataagtagcggccagcatccttttgatgttttttaaccgtgagtttcttggctgttttgattctgtcattcttaggtgatgaaatatattccatgaagttctccttatttttaaatggtactttgtttgcttgatgccgtttggcgggttttcttcttgcaagacaaaatccaacttaagtctgttgtcgtttctactataagccttatgctacactagtatggactgtggagaaagctaagatgagcaaatgctgcttgacagcatctccaattaagaaaggaagtgtctttttggtcaaacttgctaaacaaatcgtcgtccgcggacgggtgcaaggcgtcggtttccgctgggccacgaagatgatcgccgacaatcttgatattagcggcacgattgagaatcggtctgatggctctgtctttattcaggctgcaggtgaaccgttaaaccttgccaaatttgtggcgaaggttaaggccggtccaaacccatatgcaaacgtgtcgacctacgaagaacagccgcttgaagacgtgccaaacttccgcggttttcaagttaccggttgaatccaaccagtccatacagtatagttaaacccgattacattttgaagggaaaacattcatgcacaagtcgaaaaaatttgtcacacttgggttggtgagcttgctgccgttgattttagcagcatgcgcgcaaaccactaaaaaaggcacaaccatgaagccgccgacggatccgttttttggcactttttataaagtgatcggactgccactgcaacatttgatggagtggatcgccagtctggttggcactgccagcagttatgggatcgccatcatcgtgatcaccctgctagttcgtctgattgtcctgccactgatgctgcggcaacaacgaacgatgacggcttatcaagagaagcagaagatcatccagccacaactaaagatcgttcaagaggctactaagcgcgccaagacacctgaacagcagatggcaatgaacggttacatgcggaaaatatactcagccaatggcacaagcatgattccttccatgggctgcctaccaatgctgattcaactgccaattttctctggtttgtatcaagccatcgcttactccccagaaatttctgaagccactttttttggcattcagttggggcattccaattttattgtcacgattttagcaactctgccatacattgtcgtcagcttgatcatgctgcaaggcgtaccgccagaacaacgtaaagccatgcagacaactgcctttctgaatccgatcatgacatttgtcttttgtatgatgtacaacgccggattaggcctctacttcggtgctggcgggatcattctgattattcaacaagcgatcgtaacctatgttgttacgccgaacatccggaagcgaatggatgctgaaatggaagaaaatccaccggttatcgttgttgacgaacatacttttgataactgggatacggcaactgctggtgccactggtgcagctggtacaacaggtagcagcaaacctgctgatccagacgccattgatcatggcaaattacgtcggcgtaacgccggtaagcaacaacgtccccggaaataatcatcaagtcatgaaatagccctgatcgcaaaattagcgatcagggctatttgtgtacgcgacaggatctgaagccaaaagtatttgatgtccccctgtttgttcgcctcatacagtgtgggttgcttgatgacacgctcatatgaactcaccctgcgcttgaaaacaaaaaacctcagacaaatagctcgtctgaggtataaaacgattaaagattactcttgatatgggtatcagttttgcctgcttctgcgcgcttagtggtttcctgtgcagccagtgcttgggctttagcttccgtgatggttggcaaatcaattcggaaaatggatccatgacctaaagcggagtcaacttcaatttgaccgtgataactctcaactaactgttgcgcgattgataaacctagtccgttgccgcctttttcacgactacgagccttatcaactcgataaaaacgattaaagacgcgtcgacgatccgcttcggcaataccttcaccaaagtcttgcaccgcaacggcgacaccggaaacgctgttttcagccattgatacgtgaatctccttgcgatcagtggaatacttgaccgcattgtccaataaaataatcatgacctgttccaaatgattgcgatacatacgcacaaacgttttctgttccaagtcgtcatctaatgtaaacgtgaattccggatgaatcatccgaaaatcaccaacgacttgttgcacagtctggtgcacatcaacaaccgcatttggaaattggatatccacttgatcagcgcgagtaagatctagcatttcttgaatcagactcttcatgcgagtcacttcctgcaatgaggccgttaaagattccgccaaaacttccggatcatcttttccccagcgatttaaaagctgcaaatgcccttcgagaatcgccacaggggtgcgcaattcgtgggaaacatcctgaacaaactcaccttgctgatcaatgtagcgttgaatccgatccaacataccattaaattccagcactaaatcgccaagctcgtcgttgcgcttcaaggctggtattcgaaccgtactctgcggttcctcattgacaacatcaatagcattcgtaataagcttaatcggcttgagaaagcgcgtcgccaaagcatagccaatgagaatagaaataagaatagccgcaaatgacagtcccataatgagtaacgtaatctcatgcatggtcgcatgaaatgccgtcagtttatccgtaacctgcacatagccgatcaaatccgaactagttgcagaataaatcggtgccgtaccgaccaagccatgaaaatcatcaatattggcttcttgaacttccacgccatgaaccttgcctaatgtaatcggcgtatcgcgcgattgaaaaatatttatccgatcaggtgaaaaaacagagacgctcacatccgcttgcgctagtttttgaatcacggaatcggagaaaatacgattttgcgattcacttggcactggaatagaggtttgtccactcggcattgcaccttccaatcgcggcacgacctgcgccatcgttaagtcaccactgactggggaaagtcgttggacgacggtgttaagggtgtccgtcacggttcggcgttcctgattcactaaaatctgccgcatcgcgccataaaggatcattgaaaaggtcacaaaggtcacaaaaatcccgacacctactgttaaggcccatttaacctttaacgagatgcggggactttttctagtttgctcaagcgtttgtttcttcggaatcattacgaacgcataacatagccggttccccgaaccgtttgaatataactcggttcacccggtcgatcgattttattacgaatataacggacatagacgtcaacaacattcgtttccacgtcagagttgtaaccccaaacctttgagagcaaaacgtcacgagccaaaacaacattgacattttccataagcgtcagcaataattcgtactcacgtttggttaattcaataatgtcgtcgccgcgccgaacaacgcgattttctttttcaatcactaaatcacgatatttgatggttgtctgcttagcggtgttgttttcgccttcaatactgattcggcgcaacaaagcacgcaagcgcgcgagtaattcttcaatggcaaatggcttcacaatgtagtcatcagcgccatgatccaagccactgacgcgatcaatgacagaatcccgcgcggtcatcataatgatcggtgtattcttcacctgacgaacgcgccggcaaacttcaaggccgtttaattctggcaacatcaagtcaagcaagatggcatcccagtcctctgccaaagccgcttccaacccggttcgaccgttaaaatgcacttcggtctcatagccctcgtgttttaattccagttcgacaaaccgcgctaaatttttttcatcttcaataattaatattttactcatcaatggtctccttatacttattcgtctctgacgcactcacagactgaatccatttgttttttctcataaaaacatatgctacgacagtttagcacagttttctcattttgactatcagccgcgcaacgatggggctcgacaaacacaagaaatctttgttcggagactttctcatttttcaaaactggtaaattctcataaaaagaccaatccttcaaacaataaatatgtttgtgagattggtcttcatttttataaatatgaagttattaagcttcggtataccatgaatagtggtagatgccgtcgcgatcggttcgttcgtaagtgtgcgcaccgaagtaatcacgttgtgcctgcgtgaggttagcaggcaagacggctgaacggtaggaatcgtaataactgatagcggctgagaagcctggaactggtacaccagccttgacagcaacaccaactaagtcgcggacactttcctgataattcttggcgatattcaagaagtagtcatccagcaataagttctgcaaatcgggcttcttattatacgcatcagtgatgttttgcaggaaacgagcgcggatgatgcagccagcgcgccagatcttggccaagtccccatattgcagcttccaatcgtacttctctgaagcaaagcgcaattgttcgaacccttgggcatacgacatgagcttactgaagtacagagccttgcgaatcatttcaatggcttcttttttgtcaacagaaacattggcaaccggcttcggcaataccttgctggcctcaacccgttcttgtttcatggcactgatataacgagcgtagactgattcagtaatgacactctgcggtacccctaattcaagtgctgactgggaggaccacttgcctgtgcctttattgccggcacgatcaaggatcatgtcaacaatcggtttgtcactgccgagatcatccttgcgagtcaaaatgtcagcagtgatgtcaatcaggtaagaatccagttcgcctttgttccattcactgaaaatatcagccatttctttgacatcaaggccaagaagattgcgcattaagttgtagctttcagcgatcagttccatatcgccgtattcaatgccattatgcaccatcttgacatagtggcctgctccgtttggtccgatatacgtgacacaaggtgcgccgtcttcagccttagcggagatggcttccagaattggtgcgaccaggtcataggcttctttttggccgcctggcatcaatgaagggccatgcaaagcgcctaactcgccaccggaaacacccatgccgataaagttaatgcctgacttgtcgagctcagcactgcgacgcatggtatcttcaaagaaagtattaccgccatcaatcagcacatcgcctttatctaataacgggagtagttccttaataacagcatctgtaccagcgccagccttaaccatcatgataattcggcgtggtttctcaagtgatgcgacaaaatcttcaattttgtaacttggtaccaactttttatccggatgctcttcaacaaccgcctttgttttgctgccagtgcgattgaagatagcaacggtattgccgcggctttcaatattcagggcaagattcttgcccataactgccatgccgacaacaccaatttgtggtttatccatgaacatggacctcctcattcatttcgtcatttactccttttatgttagcagaaacagcttgggtttaacagtcaacagctagtttagaagcggtcaatttttcttcgcttattttctttgaaaaagaagacgccgcctcaggcaaacagacagaatcagctttgtttcaactattttaaaatgctatccctctgtgtgagctgttatcacggtgaaactgttagcattaattgtcacgatgatgtgatcaatcttgacgtaccaatttttaccctttcgattcatgattgcttcaggattcagaattttctctttgcaaaatgcaatgacgtcccgattagtaagtgaaagattgtgttcaatccggatgcgccctagttttgtagtgtgcaatttgtctaagtttctcagtaactgattatcagaaatcatttttatattcaccgcagcgagctttattttttgagtccgctcccttatcaactgtttttgagtcatgaacccaacaagactttctcataaaaaccgttttcgctactacaaaagaaaatggcatcctcgcaatacaattacgaaggtgccatttgtcaatagatcaaatcgccttaccgtgagcctgaagaccttattgatcacgattgatcgtcatcagggaacattccctttaatttcgtaaagggattgtccgcctgtttttcttttttaacagctttatcaaaatcctcttcagctaaaacttcccagtcatcgcctgagggcatatcaccgcttgcgacttcttctggtgtcaggacctgcattggaatgctcaacaacagatggtcctcaattgctggcaacagatccagttcagcatcttcgagcggcataagaatttcgccgtcctcatattggtcagcatgaccagcgtccgttaaataaatttcgctgaacgtaaaatcttgcggcagtgtgaccggcgtcaaactgcgcgttgacggcacaaccaaattaccctttagattaacactgaccaaaaagtcaccacgatcatagacaatatcgccgcttacctgaatgggactcacgtcaagaacctcgggatcgcgatcctgtaaatccgttttaacatctaacgtggtgctaaaatgcaacggctcctgatcgtgttttattaactcctgaacggtccatttcaacatgtggtttacctcctttaaacgcgttcgtaggcgcagaaacctgcacataagagcctcaagcctcaatggccaaggaccagccattgaggcttgaggccacttatgttccggtttctaaacgcgcctactcacgctctgctcataaacgcgctcactggcgcagaaacctgcgtgtaaggacctcaggcgcaatgatccaagttcggtcatcacacgtgaggccgcttatgctccggttactaagcgcgccagttcgcgctcttcacatcagtggtcgtcggccatagttctgctcaacgccaccaatcgttgtgattaatcgatccgcgcgatgggtcatcgcgaggacgccatccggtgcaagcatatcagcactgacctttgtgagcaagggccagtcaagatcatgcttgacactattgagatactgccgcccagttggcgtgaaccctaaaacatgcaactgcgggtgttgccgtgcctgattaaccgccgtagccgtcatattcaaagtaatggccaacgctagccgtcgcaaccgcgcataggtatagcgtttcgattttacctgcttcaaaaaagcagtcatgtcttgcgcgtcatcaattttttgggtgaagcgatactctaacccttctgccatggttgcgaccagccgcagttcattgagctcggctgtttgcacgcgatatttcaaccacgggaaaaattgtgcccagctatactgttgttgcttagcataaaaatcgacaagctcagtaggcacgatggcttcaaccgattgatcagcacgtaaatactcacgcactgtcgaggcgctggcgatgttggcttgaatgcctacttcatcatgaccaatcccacgacgcgcaaatggtaacaatgtcatcggcctcttcaacgctaaattagccttggcataactcaagcccagcataaaattaggatcagtttgggtgatcccagccgcttttgcataaacagcgttgagttgcgtggcgtatgtctgcgtataatcgcgaaatccatcctcagttaacgctgctgtcgccagtttttcagctaaatccgcataagcaacttcaggatgctcagtaccaaaggctaaagtgttgacacccatggcggccaacgcggtcacaccggcttcagcaaactggtcagcggcctgaacggctccggtcaccggcaactcaacgacaatgtctgcaccatgctgcaaagccgcctgcgcccgaacccatttatcaaaaatagccggctccccgcgttgtacatagttaccagacatcacgacaacgacaacatctgcttgcgccagctttcgcgcttgtgccaaggcatatgcatgacccgtatgaaatggattaaattcagcaatcatcccaactgtctgcatggccgcctcctaaactgcaagatcatcatggtcattcattttttcttcgcatgaaaaaaccagcgtgtgctgtccgcctgaattggctgacggccaaaatcagctgtcacttcaattttttcaaacccacttgcggttaaggcatcgagatagtcgttaatcggataagttcgttctttatgggtttccgtaagcggtttataggcatccaggccttcatcataaagaaagaacgttaaatcatgctcaacactatgcggcacctcacctacgaaactgtgccataaaaaggcaaaatcatcggtctgataattgtacatataaccaggaaaaatctgatccatttgatatagcgagtgcgcatcgaaaagaaagtccccgcccggcggcaacaaagatgctacctgagtgaagacttgctgaacttcttcaagattcgccatataacaaatggaatcgtcaaaacatgtcacgaccggaaacggtggtaaatcactcaaatcacgcatgtcgccttgaataagagccagttgggcatcggcttcctcagccttttctgccgccagcgacaacatttcgtccgataaatcaaagtcggtcacctgatagccggcttgcgccaacaacacagccaagaaacccgaaccgcctgccaactccaagataggctgaccagctggtgcaacccgcttcgtgacataatcccgccactgcgaatagagtgattgatccatcagtttgtcgtaaacttcggcaaacgtttgataaatcatgcttcaacccactgatctacttcaaccagcggtgcttcctgccataacttttcaaggttgtagaattggcgttcttctggcatgaagacgtgcacgacaacatcgttcatgtcaatcagcatccatttcgatcctttttggccttcaatacgacgaatcgtaacgccggcttcttcttctttatcctcaatttcatcgacaatcgcttgcacttgtcgatctgaagtaccgctcataatgacaaagtagtcagctaataaactgacaccgcgcatatctagcgccacaatgtcttcagcacgcttagaatcacctgctttgacagcaacttccaacatcgtttttgaatcaatcataaattactcctttgttaagaatgcgttataagttaatagtgtctttggaaaaacgagtttgcgcgcaccaatgagataagtcaaggtattctccaattcaattcgactagcttcttccaagttcgtttccgctgccttacgcgcctttgcttcaaccggcaaagatcgcgccggttcgataaaatcaccaacaaaaatgatttcatcaagcttggtcatttccggatcacctgtcgtgtgccgcgcaatggcagtcaatacttgcttatcagtaatgccgacctctgtttgaatgaaatgaacgccgacaacaccatgccaaacgccgcggccatattgcaacaaatccggatcgaaaccatcttcaataatcacgcgtttataggtctcaactggaatctctttaccataatcgtgcagtaaacctgctaagcctgcgcgatcaacgtcttgatcaaaacgcttggccaattcaatggcagtcgcttcgacccgcaaacaatgctcataacgcggttcatcgagccgattgtgcagccgatttaaaatttcctcacgacttaagccatgtgtcagacttgccggatattgatgttcactcacgatataatccctctttttgaatataatcaattactgaatcaggtaccagatacttcaaacttcggccattttcgacccgatcacgcacatcagttgagctgatatcaatcaaaggcgcatccacccacagaattggataacgactagctggcgtatacccacgccgtttaacaccgacaaatgtcaccaatttgacaagttcgtcaatgtgcgaccactttggcagataatccaccatatcggctccaataatgaaataataatcggtgtctggatgtaaccggtgcagctccaacatcgtctcataagtgtagctgacaccgcctcgtcggatttcaatcccttccaatccaaaaagcggattgtccgcgatagctagttgcaccatattcacacgatgccgcgctgaaatggcagttttagtgtcgacatgcggtggttgattatcgggcataaaataaactttttctaatcccaactccgtgccagctgcttcggccatgattaaatgaccgttgtgaatcggattaaaagtcccaccaaataggccaatctgttttcgccgatgctggccaagaatctgctcgcgcatttcaacggagatcacgggctgggtcaatgtgacactctgcgtcttctccatagtgatcctcttagcgtgcgttaacttccaggctaatttttcgatgatctttcttctcagcctgcttatagacaacaaccgtgtgaccaatgatttgggcgatctccacaccttgaatggccgcctgtaaggtatcggctacctcttgcggtgtatcatcggcagccggcagtaaactgattttaactagttcccgcgcttcgagggcatctttcaccccagccacaaacgtgtcacctaaaccgttcttaccaacattgattaacggcttcgtggtcatcgccaaactgcgtaaatatcgtttctgtttccctgttaacatcaataacgctcctctaaccgtgtcggcaggcatagctctttaaacacaactggctgagtgcctcgttgtggtcatggatacttaccgccgtacacgttttacttcgacatgattaattatgatacgaaagatagtttttctaaatgaacgcacgccgtaacaaaacatccacaccttttggcgcatagccggcaaccgtaacaccagcaggcacagtgatccagcctaacccggcgaaaactaagtcggctttttcctttggggtgaattcaaaccgaaccaatggcggaaagtctggcacttcatccgcctgtggtggtgacagtaaaccgcccacatgcttctgatagaaatcatccgcattttctaacttggtgcgatgcagtgtcaactgattatcagtgtaaataacgaaactgttgcgacctccgcgaaggtaatcaaatcgcgctaaaccgccaagaaaaatagtttggccttcattcaattgataggttgctggcttgatgacggaagtcggtgagactaattttaagtctttagggccgacaaagtgtgccatctgatgccgatgaatgatccctggtgtatcaatcaatgattggccatcatccagcgggatcataatgcgatccaacgtcgttcccggaaaacgcgacgtggtaatcaaatcctcaacgccagtcaattcttttataattcgattgatcaaagtagatttaccagtattcgtcacgcctaccacataaacgtctcgatgatcacgatatttttcaatggcatccaacagctcatcaacgccaaaaccttttttagcgctggccagcatcgtgactaccggacgcaacccttgtgcctttgcctgctgctgtaaccaattcttcaatcgattcgggttaagcgacttcggcaacacatcggctttgttcccgacaagaatgactgggttgtcacccacaaaacgatgcagtccagggatgacactgccattgaaatcaaaaatatcgatgacgttgacaatcaacgcattactttcaccgatggcattcaacaagcgtaaaaaatcatcgtccgtcaacgtcaccggcgcaatttcgttgtagtgccgcaaccgaaaacagcgctggcaataaatctcgtcatcaggatcggccttgcttaaagtggcttttggcaagtatcccggctttttgggatcagttgtctgcaaaatagcgccgcagcctatgcaacggcgctctgtttcagtgttcgtggtatccatgaatatcctcctgataatccaaatgccgtttcttagcgagtgctttaaaaacgtaaccttcaaagtaacgattaattctggtgttccacgcatcactttgaacaagtggctgggttaaaacggttcgcacaccagcaagattgcctgcccaaatatcggtcagcaattggtcgccaaccatcaccacttcagatcgcttaagccctaattgtttgcgcgctttcgtgatacccacaggaagcggcttcaaagcacgagcaacatatgccacacccagcttggccattgccttgtggattcgatttgcattgttattcgagacgaccaccactttaatcccgctattgcgcaagtccgtcagccagcgagtcagtgtttcagtgccttcgggatgatcccacgccatcaacgtattatctagatccgtcaagaccgccttaatcccttgttgtttcaagctggcaggtgtcaaactgaaaatattcgttaccagccaagtcggctcaaaaactgccacaaatcttgtcccctctccggttttcatatccttatattatagccgaaaagcgtgccgagcgcgagtcagcttcattgacaggcgtggcgagctccaatcctattgatccaaaggtgtacgcctttgtccgggatggttccgcgagctctctgcttgccattaaaattaaagaagctagttaagctactctgttttcttccaacagcaaaatccttcagcaattataaaaattgctatttttccaaacaagcgtcaagcttgaatgaaaccgttatctttttaaagacgaaatcatcgccttatatgtcaaaacaaggtacgattaggttgatagcagcgactcgcattcagcgaataagactgttatacttatttttagtaagtgtatcaaggaggaggcaatgtcatgacccgtttgcatcatgtgtcgctgttgaccggtgatgcaccagcgacaattcagttttatacaaaggttttaggtttacgtctggtcaaaaataccgtcaatcaggagaacgttcatgttcgacatctgtttttcggtgattaccaaggaactcctggcagtgtggttaccttttttgcgattgatcgattggggcatcgctacgatgggcaaaatcaattgggtgggattgatcttgccattccaactgggtcattggcattttgggaacagcgtctgcggatggcaggttgtgtggtgacagccacgctgaccagtttaactttggttgatccggctgatacgccggtcagactgttggtgaccgatcaaacgttaccaacgcaacttgtcgtgccaaacgatgttccgggcgaaaaccagattaccggattaattaatgtcgatctcccagtggccgatcatgaagctgaaaagaccttctttcaaaccatgctgggtgtgacccccgaaaataatcaattcaagcttgaggccggtaacaccttgacccttaagcctagcctcactgatagcatcaaacgatttggccgcggaagcatggatcattttgcgttaaccgttgaccatgaagaagcactgccgcgactggggacaattgccgcacaacatggctatgaagttgaggagtttgctgatcgcggctggtttaagagcctatatgttcgcgatcctgccgataatcggattgaatttgccactaaggaacccggctttgcgttagatgagccgcttgcccacctcggcgaaggtctcggactgccgccgaagttcgaggcacaacgtcaagccattgaaacgtattttaaaaccaaaggagtggatttccatgattgaacacacattattaggtatgaaccacgtcacagccatggccagcgatcctcaagcgatttttgacttcatgagcaaaacgctgggattgcatcttattaagaagacagttaaccaagatgcgttggatacgtaccatttttatttcactgatgatcaaggtactgccggaactgacatgacattcttcaccttccctaaccagcctaaaggtaaaaaaggcacgaacatgatctcccgcgcaagttttcgtgtgcctagtgatgcagcgttagattattggctcaagcgatttgctgaaaaaggggttgctaatgaaggtattagcaatcaattcggtaccaagattattaacttccatgatcaagatgatcaacagtatcagcttgtatccgatgaaaacgatcatggggttgccggtgggacgccatggaaacacaatgacgtacctgaggaattcgcgattactggccttggaccagtgaccgttaccattttcaacttaggtcatatgcaatatgtactgaccgagattatgggttataagcaaattgctgaagatggcaactggtcactttacgaggttggcgaaggcggtcatggcgcccaagtgattcttgagcatcgagaagatctgccgattgccgaggagggctttggcaacattcaccacgcggctttctcgactgagaatcgagaaaccttaggtacgtggattgatcgcatcaagcagtatcgtttgccgcaatcaggttacgttgaccgcttctacttcaaatccgagtatttccgcgcggcaccgcaaattttgtttgaacttgcaaccaccggcgcaggcttcttacaggatgaaacttatgatgaagccggcattcacttagagttgccaccattcttggaaagcaaacgcgaagaaattgaaaagcaattaaccccagtcaaaaccgactggcgcggacgttaatgattggaggttgcgatggcagaagataaagtaaactacgcatttgttaaaggtgatccaactgtctcaccattactattactgcatggccaaggcggcgatgaaaatgacttactgccaattggcaagtacctctcgccaaatagtcccatgttgtcgattcgcggtcgcgtgcaagaacaaggcatgaaccgctacttcaagcacacggaaaatggcggctttgatttaaacgatcttgaacaggagaccacttggctattttcagtgttaaatgacctttgccggaaatttgacatcgactatgagcgatttatcgtgatcggctattctaacggcgctaacgttgctgcacgggcgctattgacgcgaagtgatacattccacacaggcattttctttcacccgatggcactttcgacagtcgattcaaaacaagatcttagcgatgtcaaagtctggatgtcacatggcgatcaagatccgattgtgccagcacaaaacttcaaagtgctcgatacgtaccttgaagagcaaggtgccgatgtcacgattttccgtcatgggcaaagtcacaatttgaatgaagaagaattgacaaacgccaaaagctggctggcaaagagtggtcggttagctgattggcgacggaggtgaaagactatgcaacgttttggttttgaacagtatggtgatccgagcgtttttgaaaccattgaggcgccgattcccgaaccaaaaactggtcaagtacaattgcaggttcttggctttggcttgaatccctacgatgcttcactgcgtcgtggtgaacaagcggcttttcgaaaagttaagttcccagttgtccccggcacagatgttcttgggcgaattaccaaactcggcgaaggggtgactgactttgctattggtgatcttgtcttgaattatcgaccaattggcggttacagcgagtatgtcaccgcctcaacttcaaaaatttacaaaaaaccgactgccttaagctttttggacgctgctgcactaccgcaagttggcttagctgcttttaacattttgcactatatgctgtcacttaagcctggccaaactttggcagtcattggcgcaagcggcggtgttggtgctatcttggtgcagctcgccaagtttgaaaaattaaatgtcattgccgttgcaggtgcccaacaccacgactatttgcaacaactcggggccgatcagatttacagctatacagatgatttacctgacagccgtgctgatgctgtggtcaacgccgtttttggcgctgcagaccacggtgcctcgctaaagcttgtcaaagctggcggtcaatatgtgacgaccgcttatgctgacgttgatgttagcagcaagcccggcacaacccacctgcaattgaacccatcgaaggactattctgttcatgatggctttgcctatttagttgatgtcgcccaaaaatggggtctgcaagttcgtgtagcgcaatcatttgcttttaccgtggatggcgtcattgctgcgcatgaaatgttggaaacacaccacgccccgggcaagttgattgtgatgcaagatcgtcatgtcacccatccggttcgtaaagacatcaatcaactttaaacaaaaattgggttaacgccttgtcccgcttgttttcacgccgtatgataaacgggtgaacgaaaggcgggacaacatgaaaattgcagtttattgtggcgccaatagtggcgcggatccagcatttctacaggcagcaagcaaagttggcgcatggattgcggcacgtggcgatacgctgatttatggcggcggtaaactcggactaatgggcgcagttgcgcaaagtgcccttgaccatggcggtgacgtcatcggcatcatgccgcaagtgctcgctgatcgcggcttagccatgccagccttgacgcatttagaagtcgttgctgacatgggaacgcgaaaagccaaaatgatcgagatggcagatgccgaccttgcccttcccggcggtcctggcactttggaagaaatcaccgaagcaatttccttctcccgaattggccttaacgcaagcccaacgatcctgtttgatcaaaatgggtattaccaacctttgaaacagatgtatcaaaccgcagttgaccaaggtttctttgatcaggatgcgttcgataacgtgatattctcggatgatctaaccgccatcagtacgttcattgccaactatcaaccgttgggggttcggcaatatcattaaacaggttgagatattattctcagtcggtcaacaaaaaggaacgatttttcactatggaaaaattgttcctttttgcctgctcatggattatttacttaaaaaaccgtagtgccaaggcggagcaatcgtaggccagatggggctcagccgtggaaacaacacagcgaccgggctttgtcgctgatgttgttaggcgacttcgagaccggtttttgggctcgaagcgccgtcacagcgttccagccccatctggccggagattgcggagtttggcacggcaagaaagttttagcctagcaactttctacgattattcggaatttaatgaatcacaagtcttgcaaggaaattatggctcagcctctttttttaaatgtgaccccatgtttttcacttatatacgcaaaaagagcatgtcagctcgtcaaggcgagttgtgacatgctcttttaaattggcattaagccaaagcttttttagctgtgtcagccacagccttgaagccatctggatcgctaacagcaaggtcagcgagcattttacggttcatgtcgacatttgcaaccttcaagccatgcattagcttgctgtaggaaatatcgttcatgcgtgccgcggcgttgatccgtgcaatccaaagacgacggaaatcacgcttcttagcgcgacgatcgcggaaagcataacggtatgacaccatgacttgggcattagctgccttaaacagcaaatgcttggcaccacgatagcccttagcgagcttcagtaccttcttacgacgcttacgagtaactgttccacctttaacacgtggcattagaattcctcctcaaatcaaatccgatagattattatttcatctggctgagcatctggcggatccgcttcatatctgagtgggataccaatgctgacttacgcaattgacggcgttgtttcttggtcttgccgtggaaacggtgagacgtataagcatgaccgcgcttcagtgcacctgatgcggttttcttaaaacgctttgcggaagcacggtgggtcttgaattttggcatgactttttcctcctgtaaacatcagcgtgttgctggtgaagttcaccagcttgcgctttttatacgatcttgccgaaaactacttctcggcacgcggtgcaagcatcaagaacatgctgcggccgtccatcttaggatgcgtttcaacagcagcaatttccttaacggcatccgccatctgctcaaggactttgcgaccaaggtccttatgcgtgattgcccgaccacggaaccgaacgctgactttaaccttgtcacctttttcaaggaacttggtggcgttcttgagtcgagtattgaaatctgcttcaccgatggttgggcttaggcggatctccttgatggtgacagtcttttgtttcttccgagcatcgcgctctttcttttgaagctcaaaccggaatttcccgtaatccataatacgggcaaccggtggcttggcattaggcgatactaggacaacatctaaatttgcatcctcggcaatggccaaggcgtcacgcgtactcttaacgccgagctgttcaccggtctgggagatcaatcgaacttcacgtgcgcgaatactgtcattgactatcagatctcttgctatggttgttcacctccgtgtgaatttcagagaaaaaacaaaagcagcgtggccacaaagaccccgctgttcattaaataccgaactaatgagcctagcggtccaaggacttaggcgagaagcgggaacttctgctttttctcaacggatataactatacaggaacattcaggcgacgtcaagtttcagcttttagcgattttaccgctgataaaatggcgcaaactcaccgctcacatagcgtcctaattcattgtcattaggacttacgtggaattgggtcgtttctggtaaataagcttctgcaaaagcaacaacggcgtgtaggtctgttcctttatctgcatctacgaccagcaacaggctttgggtatcatcagcgcggatcatggtggtcaaataggctgcatgaacagttctcagcttcgccaagtagtcgcgcaagtgcttaactaatgtggcggtttcacgcggcggttcaccgatccgcacagcctcaccatttttagcactatcaggtttagccacgtaaaacaagttggcgcgtgatagcagcatattttcgccgtatggattgatggcgacaccttgtatatcgtgatcttcgtataaaaagttggcacagtcattgatggtggcaacagcgtattgatcatgatctgggcttttaccgaaattagcctggtcggtaaaaattggtaagaagtcctgtccttgatcatccgtaatcatgacgattgtcggatcaccatctctcgttgtcccaacaggcaatatgaatttagcagtctttaaagcagcgtaaaaagcggcttgggtctcctcattctgatcagcccgtaataactgaatcaaatgaataagttgtggattttgaacaattggttcatcagtcatcatcgttttcccctttatctcgtttctgatcggcactcactttgccacgaaacctgcgtaatttttttggtaggccaaccagccatgagagtaacacaatgccaacactgccgaaaacagccacaccttgaggttgaaattcaattttagcaaaccaccaagttgcgatgccataagcaccaacaacagttagcaacatcacaatgcccatgatcactaacaggccacggccgcgatgggcaattaaccagtaaccgcgctgattcggggtccgccatggcagcttcatgtaagcgaacaaaaccaccaaatacaaaacggcagcgaggatctttgtgaccacgaataagacgagccatgaagcccataatgcgataaacaccgattcaccctttcttttgacgtgtgtcgtaaatgtgtccagtttatcatacatgctgaaaacaaatggcggatgtgctaaatttggcgagaacaaacctgttcctaaagatactaacaacaaaattatgaatgaatggagaaatcaccatggcaacaattgacttagtgaggcatgctgaaccagacatcacgattcatgatgattttttgcggccactgaccagcgctggtcagcggcaaactcagcagttggttgacagtttgcatcaatatccgtacacggcctttttttcaagcccactcaaacgtgctgttgatacgatcacaccgattgcagatgatcacggcttacccgttcaaaaaaacgaactattggtggagcgaaaaatgcctgcatggctgccaaatttttctgactatgttaatcagcagtggcaagatttaacattctttgaaaaacctggtgaatctattcatcaagttcaagaacgttacctttcatttttatatggactgccaagttcggcattcgtcgctgtcggtagtcatggcacggcgataagcagtcttgtcgaagcggccatccccggtatcggctatcattttttctcgaaacttggttacgccgctgtcacccgtatcgaaatgcatgcaggcaatatggttcacctagctgtctgggaaccaaaatcaaagacatttaaagttctaaaatagtgtttccaaacctcaaaataatccaaaactgatggcgcttttcgggattttgatcaaaagaaaaaggagctttgagaacaatgtctcaaaagttccttccccatttgattgaaaatgacactaatcacctaaaaccttggtcgcttcgcctggcttggttttgccgtcacggctgtaattcttcacttcagcgactaaagcatcgatgaacatgttgcctgcttcttcttcggtgtgttcatccccatagcggcgaaccgaaaccgcagcatcattcaattccttatcgccgacaacaacggtgtatggaatcttcttggtttgcgcttcacgaatcttgtagcccatcttttcgttccgatcgtcaactttaacgcggagaccggcgactaacatttgtttcttaatgcgattgacgtaatccagatgcagatcattgttgactggaatcaaaacagcttgtgtcggtgctagccaagttgggaaggcacccttgtagatttccgtcagataggcaatgaaccgttccatcgtgccgacaatcccgcggtgaatcatgactggccgatgctcttcaccgtctttaccgacgtaggttagattaaaccgttccggaagcataaagtccagttgaatggttgacatggtttcgtcattgccaagtgcggtcttcgtttggatatccaactttggaccatagaaggcagcttcaccttcggcttcgtaataatccagtttcaagtcgtccatggcaccttttaacatgctttggctacgggtccacatttcgtcatcatcgaagtatttttcggtgttcttagggtcacgatatgaaagccggaaactgtaatcggtgatattgaagtcttcgtagacatccatgatcaagcgcagaatctttttgaattcttcttgaacttggtctaaagcaacaaaagtatgaccatcgttcagcgtcatttcacggacacgttgcaggccggacagggcacctgacttttcataacggtgcatcatgccgagttctgcgatccgcaacggtaattcacgataagagcgaatgtgatggttataaatctgaatatggcttgggcagttcattggccgcaattccaacatttcgccgtcacccatgtccattggcgggaacatgtcttcgcgatagtgatcccaatgaccagacgtcttatagagatccaagttagctaaaacaggtgtgtagacgtgttcatacccatcagcaatttccttgtcaatgatatagcgttcgataacacgacgaatcgtggcaccatttggcatccagtacggcaagcctgcaccaaccttaggatcaacgaagaatagatccaaatcacggccgatcacccgatggtcatgttcagcagcttcttggcgtcgtttggcatcatcttccagacccttttcgctccaatatgccgtgccgtagatccgttgcagcatcgggttgctgctcttgccttgccagtaagcaccagccactgacagcagcttcagatgcttcaagtccttgagacttgggagcaacactttttcttcaaaatcaacgaagtcgcctaacttatagcctttgatcggatcgccagcagcttcaaccaactgcttcttgaatggatcatttttgaaggcttggaaagcttcggcgcgactcaacacaactggttcaagtgccgcgttttccttgataatcgcttccattttcttttgaacggttggcaaatcatcaacactcacctgaccgtcagcacgatcggtatcgtagtaaaaaccgtcttccgttgcttgaccctgaccaaaatgaatatccgggtataagtctttcaaagcagcggccagcacaaacgctgctgtttgccgcaaaacggtcaaaccttctgcatcatccttggtcataatttgcaattgaccagaatgcgcaatcggttcgtcataagcgatcaaatcgccatctaacttgccagcgacagccttctttgccaagctattactaataccctcggtgattgccttaactgtggtgccatcaggaaactgtttgacgttaccatcaggaaatgtaatatctaatgccatgagtaagactcctttattgttttttcgaagaaaccaaaaaatccctgacatctcttaagagatatcagggacgatcagtgatcgcggttccacccagtttgccaacagcaccggctgttggccacttaattgacgcgtaacctgcgtaacagggccttgcggcaatctcgagaagtggttcggatcagatcttgcaagactttcagccatggtctcgctctctattggatgatcctttgttgcttccgtcttcgatagcttcattgaaacacattgcgcagtcaggtgcaagaggttttctgaaaaagagcgctctctggcgcgtttaggaaccggaacataaggacctcaagcctcaatggcggggctttggccatttaggcttgaggtccttatgtgcagatttctgcgccagagagcgcgtttcagccacagcgtgaactagctccgtccgcacggctacaattaattctggaaataacatcatccgccaacggtttacaactgaatagcactactttgagcgtcaatctgccaatggattgcgccgattttcaccgccgacctgcacttctttagctaaaaaatgaatccgttccatgatgcgcttggctttgagcatctctgaatttccgcgatctgtgccggcaagtgaggcagttaaatcttccatgcttttattcgagctaaacaaggtcggcattttttcctgcatgcgatactgcaaaatgatgccaagaacatcgtcgcgaacccatgggctaatgctttcagcaccgatatcatcaagaatcagaacttgcgcgcgtttgatgcgatcaatctttggcaagacggtgttgttcccgatggcatttttcatttcaaccacaaatgttgggacatgaatcaaggtactggcaatcccgcctttttcggcaagatcattggcgatcgcgccaagcaaatatgttttgccgactccaaatggaccactcaaatatagtccttgatgaaaagccttaggatcggcaacaacggcgagaacgaattgattagccgccaacaaagcatccatccgctcatcagtcggatcgtaattggttaagcttgccccacgaatgtccttgggcatgttaaccgatgtgactaaggaagcctgtttagcctcctcatcggccgcaattttggcatctgttggttcataagcgacgtcaatcaaaccgttagctgccactagggtcggcttataacccggtgccaatggtaattcgccacgagcaattttgtttcgttcgctgacaaattcgtagatcttcgcggttccgcgatcaatcgcatcatcggcgagttcgccggtatgttgttttagaaaagcctgaacttcagggtcctgcaaggcttctttgaccatcttgaaataacgatcccgccactgtcgagaatccatcaacatggcaattcgtttccgcatatcttccatcagttcgcgcctcctttatcaccgagttcacgcagtttcgccaattgggctgctagtttctcgcggtcagcatcgctcacctttttcttttcaggctggtaaccttcttgtgcccaatctggcaacttctcctgccgcggacctttggcgctaccttgacgccgtttttggccactggccttctgtttttcaaagtcacttatctgtttcaaagcagcctcgggactgttcacattagctttcagccaactgttagcaattgcatcaagcaatgcctgattaatactgtcattggttcgtaaaatataatcaatcaaaatattgatcgtcggcgcatcgaacacattccgctcactcagctgctgaacggcacgtaactcgttgttagccgggtacattcggacattttttgcctgcttggcggcggttaagaattggcgcggtggcatacttttggctttttgcaacaaagcttcgtcagctgatgccacttttggcggcgccgtcgtggtcgtcggctgcgcatgtggttgtgctcgggtgtagccttgttcagctaagcgccgcaattgactcaaattaatcttgccggtcatgacatctgtggcgcgactaatcaagcgagcaaaatccggcggttgaatcccgtaaaaaccggcgatttgatacaacgcttcctgatgcgttgcgagttgccccgcttgaatattactattcgccagcatcgctttgactaatgcccaatcatagccgccgcctgtgccaagccgtggccgcgtggcttctttttgcgtcatatctgatttagctgccaccactgctggtggttccttgctcaaatcatgatcaaaccgaaacacatcgagaaaactggctgtaatctcctgccattcaggtctgcggactggtttgaggctaaattggccaaccagctcatcgtatcttttttccccaactttgtcgtataggagcaacccgagaagatcgtccttgaaaaaggcatcaggtgccaccggtgcatacaactcataagcgtagtaacgccctaatgagtcgacttgcgtataagtgcgcaataacccgaccgcctccagtttgacacgcgcattgaataattgatcaatatcaatatctaacaaatccagcagccataattgcagacgtcgatcagtcactagtgcgcgatctttaacttcctgccacaggctcagatacaatgccatcgcaatcggcccgatgagcggctgatagagtgaaattgctactttttcgtcaaaatcactcaaatgaccggcttttgttaacacaaaccctgcctgtggactaaatgtatcaggacgttgcatgcactttcacctcttttcagacaacggacctgagacatttgcctcaggtccggtttaccattttcagctgcgatgatctttacttcttggtcttttctttcttcatcatgtcctgcagttcctgcatgaagacggacatatctttaaactgtcgataaacgctggcaaaacggatataggcaacatcatcgacatcggctagtttagacatgacaaactcaccgatcgcctgactggagacttcgttttcaccaatcgcacgcaactgattttcgacagaatcgacaatactttgcatttgttccatggtaaccggccgtttttcagcagcccgaataagtccttttaggatcttctcacgattaaattcttcacgtgtaccattctttttgatcactaacagcggggtttgttcaacccgttcaaaggttgtaaaccgaaacccgcaattttcgcattcgcgacggcggcgaatcgcacggccaccgtctgttggtcgggaatcgacaactcgcgaactattatgatggcaatggggacattgcaagactccaccctcttaatcaaagtttgatagcttattatagcacgcgtaagccgcttatgatagccgttgcagccggtggatcaaggcattggcttgggcaatggttgcctcttgagtcccattattatcaatcacaaaatctgccaatgctgccttttgcgctaacggcatttgcgattgaattcgggcctccgcgtcagcctgtgagagcccgtctcgtgccattaaacgcgatagttggatattgggatcaacgctcacaaccgcaacaccatcaaagtcatcggcataatcggcctcatacaacaaaggaatgtcgccgacaacgatggcggccccaccggcttttgcctgtgcaagtgcctgactgatggcctcgcgcaaataaggccgattgatctgattcaaggctgccattctgcctggctgggaaaaaacaatctcggccagcttggcgcgatctaggctgccatccgcgcgcagcacttcaggaccgaaagcttgagcaatgcgcgcaagaacaggctgcccaggctcgacaatctggcgggcaatgacatcagcatccaccaccggaaacccagcggctttgaaagtgcggctcaccgtcgatttccccgatgcaatgccaccggttaaccccaagagataagtcacgctggccgcctcctttgatgtaatggctgacagtgtgggcagtaatgggttccgcgctgaccaaccttaattttgacaatcgtcgtgccgcagcgatcgcacggggtaccttcccgatcatagacgtgcaaggcattttgaaaagaaccgcgattgccttctgcatcaacatacgtatgcgcgctggtgccacctgccgcaatggctgcatttaattcttggataatcgcgtcatgcagtgttttgatttctttagatttcaaggtatcagctggctgcagcggattgagccgacttaaccaaagtacctcatcagcgtaaatattgcccacaccagcgaccacggtttgatcgagtaaaaccgacttaatcggtttatgatgacgtttcaaacgctgggcaaagtccgcttcgtcaaaggtgcttggggttggttccggcccaagtttagcaagtgctgtgacctgatcctcctgcccggttttgatcagccgcatccgcccgaactttcgcagatcccgatagcgcaactgactgccatcctgaaaagtgaacgtaacgtgatcgtgcttgtcaaaaggtgtgtttgcatctttgacaacatagtaacgcccttccatacgcagatggctgatgatcgtttcaccattgctgaggcgcatcaaaagatacttgccgcgccgatcaatggtcgtgatctcactgctgacaatttccttttgaaaagtcgccaacccattgatcaggattttctcccagttagtgttgatggcggtaatgactttatttttgactaacggcagaagcgagcggcgaactgtttccacttcaggtaattcaggcattgaaatctccttatttagcgtcgaaccaagttggtccataatgactttcaacctttaatggcacatcaaggtgaactgctgagtccatgactttgggcacgagctcgctaagctgggcaatttcttcttcaggtgcctcgaagatgagttcatcgtgaacctgtagaagcattttagcttgcaaaccggcctcatccaaggccttttgcatgcgaatcatggctaccttgataatatccgcagcgctaccctgaatcggcgtattcatagcggtccgctcggcaaacttacggagattgaagttgcgtgagtgaatttgtggcagatagcgccgccgatggaacagggtttcgacatagccgtcttcacgcgccttcttgaccatcgcatccatataatcatgaaccttaggatattgatcaaaataaccatcaatgaacgcttttgcctgtttacgggaaatgccaatgttttgggatagaccatagtcactaatgccatacacaatgccgaagttagttgccttggcttgccgccgcatatcaggtgtgacttgatctggcgaactcaggccaaaaatcttcatcgcagtgttggcgtgaatgtcgacgccatgtttaaacgcctcctgcatattctcatccccggaaatatgcgacaacacccgcaactcaatttgggaatagtcagaactaaaaatttgccaaccttcatgtgacggtacaaaggccttgcggataatcttaccttcatcacgagcaggaatattctgcatgttaggatcaactgagctcaatcggccagtttgcgtcaaagtctgcaaatagcgggtatgaatcttatgatcaggcaattgcgccttcaacaagccgacaacataagtcgaattcaatttagcccagccgcgataatccaaaatgtcctgcacaatcggacttgccgatttcaattcgttcaacacgtcaacgcttgtcgagtaaccggtcttcgttttcttgatcacaggcagattcaatttttcaaaaagaatttcgccgagctgctttggtgagttcaaattgaacttcacgccagcttctgcatagattttctcttccaaaatcttgatgctttgtgagaattcagtgcccatagccttcagtgttttagcatttagggtaatcccttgaatttccatttctgccaaaacccgagaaagcggcatttccatatctgtgaataagtccgtttgttcctgtttttccaaatcaccagtcaaatcaggccgcaatgcgaacaaagcatcagacttgcgagcaaactggccaaacagcttatcgtcttctggcacttgccgtttggcgcctttgccataaatatcctcatcacgcggcaagtcatgataatcgtgatcttcagcgattttacccaaatcattgctgttttcgtcaggattaatcaaataggacgccaataacacgtcaaaagcgatatccggtaatttcacgccgagtcgattagcggcgacgatgtttcgtttgccatcaaaaactgtcagatctcgtttggcatcttccagccaccgtttaaccgctggcagcgtcagcaaggtgacatcggtactcacataagtttcttccttagtgccaataaagaaaccgatttgttcggccacatgataattatcctcgagcatttcaatctcaaaagtcagaggttcggtcagtttggtgagtgcaagaatcgattgctcatccagcacggaaaaatgaaccgcctgaacaggtttagcgacactaccaccaatttttttgagcaacgaattcatattcatttttgtatagaagtcccggagtttgtctaaatccggtccagcgtatgtcacatccgctaagtccacggtaagcggtgcatcgcgatcgatcgttgccaactgtttgcttaagaaagcgttatctttatcgttgatcaaattctctttaagcttgctctttttcatgtcatccacattagcatagaggttttccatgcttccgtattgattgagcaatttcagagctgttttttcaccgaccttggtcaccccaggatagttgtccgaggtatcacccatcaaacctttgagatcaataatttgagccggtgtgatgccaagcttttctttgacatgtgctggggtgtaggcttcaagctcattgacacccttcactgtcacttgaactgtggtccgatcggtcgtcagctgcgtcaaatcgcgatcacccgtgacaatcgtcgtttcccagccggcctcatccgcacgcttagccattgtgccgataatgtcatcggcttcgtaatcctttaattcataatgcgcgatgcccatgtcatccaataattccttgatataaggcaattgttccagcaattcgctcggtgtcttggcgcgaccacttttgtaatcagcatatttggctgtgcgaaaagtcgtcttgcctgcatcaaatgctactaaagcggcatctggttggactgcctttaaaacaatctcgagcatgttgttaaacgcataaatggcgttggtgtgcaagccatcttggttcgtaaaacggtctaattgattatataaagcaaaaaatgcacgaaatgcgactgagttaccatcgactaataataattttgttttgctcgccataagtgggcttccttttctacggccgctgctgtcaccgcgacctgagttagttgtcatagtcattgtaccaaattctgctaaccggtgacttgctggtcaggggaaaactggcagaaaacaaaaagagaactggcaaataccagttctcttgaacatttttagttaattattgttattcccaacaccgagaatctgtaggattgcggtgaacaggttcaagaagtcgagatagagcattaacgcaccgagaaccgctagcgagccttccgaaacggcagcttgtccatcattgccagtggtgagatacaggttcttcagccgctgcgtatcccacgccgttaatacaatgaagataatcaggacaccgtatgaaatcagcagttgcatcccatttgagccaaggaacatattcacaaatgacatgatgatgatcccaaacaaggcaaccatcgcgatactgccggctttgctcaagtcacgcttgccaaaatggccaaccatcgacatgaccagaaagacaaccgctgtcgtagctaaagcaacggcaaggttagtaccgtccgcaaccatggcaactgaagcgaacgtgaagccaaaactagcggacatgaggtaaaacatcactgttgcataccccggacttgcctgtgcgcgacgccctgtcacaaaaaatgacaaaatgatcggcataaaagccatgatccaaaaaacaatcggatgcccactcacaaaactggtgtactcagctctgaatggaaatcctaacaaataactgacgagcgccgtcacgaccagcccgctccccatcaaggtatagatgcgggagaagaactgtgtcaagccggcctcgtttacaacacggcgttcttgcatagcgttcattcctttcaagtaactctttcgagtatctgaagaccattataaccggaatgatgatatttgtcagtcaggcgaaagaccgatctttattatgagcagttttcgatcattttagacacagttttcgatgtccaacaaatcatgatcacacggtctattcttcagccaatatggtttcgtaagctttttcatacttttgaatatcaccggcccccataaagacaaccactgcattatgatattgcagcaaaggcttcatgtcttcctgatgaatcactgcagcgcctttgatctgcgcggtgatatcttcggatcggattttaccagttttctcacgagcagaactgaaaatcggggttaagaatgtttgatcagcttggcttaggacctgaacatattgtggctcgtaggcctgcgtgcggctgaaggtgtgcggctgaaagacagcaataatcgccttgtcaggatacttttgacgagcagcatctaaggttgctttgatttcattcggatgatgagcatagtcgtcgacgatgatcatgtccttgagatccttttcggcaaaccgacgcttaacgccactgaagttgccgagctcgcgggcaatcaactttgcatccagcttttccatgtgagcgaccgcgaccacagccagtgcatttaggacgctgtgttcaccaaacagcggcacaaagaaatgaccgatcagttgatcgtggaagtaagcatcaaagctgctgcctttcgtatcgcgatcaacgttgcgagcctgaaaatcatcacggtcactaatcccataataataaaccggcacctttgcctttagcttccgcagccaaggatcatccccccaagctacaattgcttttttaacttgattggcctcagtttcgaaagcatcgtatacatcttcaaaaccagtgtagtaatcagggtgatcaaaatcgatattggtcataatcatgtagtcaggatgataggccagaaaatgccggcgatattcatcagcttcaaatacaaagaatttggagtcgggaatgcccttgcctgtgccatcaccgatcaaatagctggttttagcaacgccgcttaaggtatgggccagcaaaccggttgtactggtctttccgtgcgcaccagcaaccccaatactggtataaccttcaatcagcttgcccaagaattcgtgataacgataaatcgtgagtcccaattccttggcccgtttgatttcaggatgatcgtccgtaaaactattgccagcaatgacagtgtaacccggtttcaggttagccggatcaaacggcagcatcttaatgccggcagcggcaagtcctttttgggtaaacgtatattgagtaatatcactgcccaaaacctgatgccctaaatcatggagcaccaatgccaatgcgctcatacctgatcccttgataccaataaaataataggttgcctctgtcatgacgtttgttcctctttctttgcttgactgtaataaacttcccgcggctttgcgcctttagctggcgaaacgagatgcttcgcttcaagcgcatcaatcaaattagccgcgcggttgtaaccgatagaaaaaacccgttgaagctttgaagtcgagatatgccgttcaccagatagatagtctagaacttcaggcatcaactcgtcttcatgtgacacgctggcttcagccgatttgaccaagccagccggatcaaaaagataacgtggtccgcgccgagctttgacataatcaacaatcgcatcaatttcgcgatccacgaaggttccttgcaggcggatcggctgactagcgccattgcccagatacagcatatcaccacgaccaagcagccgttctgcgcctgccgtgtcaataatcgttcgtgaatcaatttggctggcggtcatgaaggcgatgcgcgtcggaatattattcttgatggtaccagtaatcacatccacacttggccgttgagtggcgaccaacaaatgaatcccagccgcccgggccttcgccgtgattcgcgcaatgtcatcttgaatctcactgcccgcagctagcatcagatcggccaactcgtcaatgataatcactaagtatggcaggacttgtgcgtattcgtgaaaacgctcggcctttgcattgaactgttccaaattacggacaccagccgccgccaacttcttatagcgatcattcattgttgacacgacccacttcaaagcggcactggcagctttgggatcggaaataactggcgataccagatgtggcaagccattataaccggcaagctccactgcttttggatcaatcagtaataaccgcacttgttccggtgtagccttatagagcaaggatactaacagactgttgatgaagacagactttcccgaaccagttgctccggcgatcaagccatgtggcatcctagccaagttggtgaccacaggctggccaaaaagatccacacctaaagcaatcgtcagtggcgattttgcctgctgaaaagccggggtgtctaggacttcgcgtagcatcactggtcgcggtttcagatttggtatttcaatgccaaccgtatttttgccaggaatcggtgcttcaatccgaatgtctttggctgctaaggccaatttcaagtcatcattgaggttcgtgattttattgactttaacaccactggccaggcggacttgaaattgggtgacagtcgggccaacagtgtgagcgaccacgtgtgcatccacgttaaaggcttgcaacgttttatccaaccgatcgctttgtgccacaacccaatcttcttgggcagcctgatcaactttgaccggcgaagcaagtagcttgagcggtggcagtgtgctaacccccggtattggccctgtaggtgcggaacctgtgtcctcagccgcagccattgatgaaggtaaaataccagttgacggtgattgcgttagtgctgacgttgaatagtcggcatcattggctgatggtgtttcagccgtcgttgaaggtggccctgatgtttttggtgatgtttgcatctctgcctgagcttgctttgcctttgccttctgggcagctaattcacgccgtagctttttggccgcatgtttgcgccgcaacgcctcaattctcgctgccttgcgactgttaggcgcatgtggcttattgatgacagactgtgaggacgaatcaacaaacggcttgttaaccgatgctggagcctcctctgcctcatcagcggtcacagcggtcagtaatgtctttttttcggtctccgctgacttagcctgtggttcaacagcagatgttgccggtgtcgaagacgataattggtgcgtgtcggttggtgttaccggtttggcggcaactgacggtgcggttgcttctggtaaagtctcatcaagcggcttttggttctgcgtcccggcttcatccgatttttctgctaataaggtatcttcctgcggtgctttagaagcgttcgctcgtctgtcagcctcattttcatcttgtttttctataaatgacgtcgtcgatttggctgtattcgtatcagacggtgtcagcgaaatatcatgattgacggccatcttattttcgatgccatggcccgcaaaaagataaaccgtttgcgaatctggtcgcaaaatctcagcaatttgtgcgtaatcggtacgatcaacgggacgccgatgagctgtgctgtttggtgtcgataggcgcgacaactcatcgcggccccgcggtcgttgcggataatcaaaggcacgcaaatcggcctgagcctccgcgaccttgcgcggatccacatcaggctttggttcgtgcgccaattgcggtggcaactgatattgttcctcgtgttgcgcctgtgtccagtccgaagtattcaactcagattggggttccggcactttattttgatgtagaaatgccgggccatcataatgcgccatgattgaatccccttctattcatgtttctagcagtgcctctattttagcataagcaccgcaaccaataatccttgatccctaaaaatatcaccagcaattggaaaaagattcatgttaagaccagtgattttgcaattggagacaaaagaaaagacgtaagcacgaggcttacgtcaaattttttcgttattcgcgatcaaaacaattacaaccggctgttcagatgggcacaaattatgatgcttgaacagcaacaacggcctcggcttttttagcatcaaatggtgtgcctgcaggtaaactatcaggcatcaccaagataccgcgacgttgtggcgcgccaggaatgcctaactcacgagcactgctgatcatgccgtaagagtcaacaccacgcaacgagcccggccagataattttgccatctggcatcatggcacctggcaaagcaacaacaaccgtttggccgagtgctgcatttggtgcaccgcaaacgatttgaacctgttcattaccaatatcaacttgcgtcacatgaagatgatcagcatcaggatgatccttaaaatcaacaattttgccaatcacaaacttaggggtttcatcgaccgctagtttacccggcagccctgccgtctgaatagcctgattaagctcggcaatttgtgttgcggtcaacacaaggcgaccttggccagttaactgacccagccactgtgtcacgttgaaaaagttgtagccaatcacgttgcctttatcattgagaatcgcaacaatgtcaccacgtcgctgaattgtttgtgttgccgtatcctgacctgtgatggcaagcaaggtgtcgccaaacgctggttgattataactggtaatgagcatataaacctccaaaaattaatgcaagccgttaatgaaatcttcgacttgttgtttcgtcttacgatctttattcacaaaacgaccggtttccttgccatcgttaaaggcaataaagctcggaatgccaaacacacccatatcttgagcaacttctaaattcttatcgcgatcaaccgcgatgaattcataatctgaaaagtccttctcaatttcaggcatagctggtttgataaaacggcaatccgagcaccaatctgcagaaaagaacaacatttttttacctggttgcttgacctcatttaaaattgctgcattagagcctaattctttcatagccaacatcctttcgcttactatttataagtaactataacaggaaatcgtcttaagatcaatgatgctcgtgctgtgttacattatactcaaggtgataaagcttgaacaggtcaacaaaagccaagtcacacatcgtcagatcagttagagattagcagaagacgtcagcaatgtctcgcctttatatcagttttaaaagaacgtccggaataggttggacaggttcgtcttcatcactaaagggggtcacaaatttggcaattttcaaaaagaagtcgaattggcgtgtctggatagccgctgctgcggtgacggccggcatggcttcgattgtttatcggcgcctgtattatcgaaccattcctaatcgcattttgtccatcgtcaagaccaactttacaaatcgcggcaccatcgaaaatagctggatcaacatgcagccaaccgaacgcgggactggccgtgatcgctatcgcgtgtatactggcgggttgaccgtgcgtgaaggcgaccgcctcaatcagtttgcctttgctgttgagcccgatggtaccttaagacaattaaaacaacttcacgaaccgattaatgcttaaaatgcgcgacaagttcgtagattcgaccgccatcagcgctgaacttctcttcgtattcagtgggcacgttatccgtgacgcgtttgtcgtgatgtaggttcaaggaaaccaaatcgaacgtcatcccaaaatgattcatgctgaccaaggaatattcaaacaacccttgattatccgttttaaactgcagcaaagcatctggcttcataatggcttgatactgtcgcaaaaagtcacgataagtgagccgccttttttcgtgacgggtttttggccacggatcggaaaagtttaaaaacaagccatcaatctcaccttcactaaaataatcggttaagtccgcaccatcgcccagcacaagctgcaagtttggcaattttaaggcaacctgttttttcagaatcatcgctacagcggcttcctgtaactctaaagcaataaagtttcgatctggatgggtcttggccatttcgacaataaattggccctttccagagccaacctcaagatacaatggccgtgcttggtcaaatcgcgattgccagtgaccttgcatcttttctgggcgaaccaaaatcatctcaggatgagccaagattagcggtttcgcccactgtttgttacgtaatcgcataaaatttctccttaacttgaacattggctaggtcaaagtacaccgtgaccgctcaaaaggcctgggacaaaatcactttttgcctcaggccttttttgatgaatgaccttgcttgtttgcagcacagcttaccgactcgcttgtaaacattcgaattgatgcaaaacttgcgcaacttcttcgaatcgttgatgcgtggctgctaccttaatatcatgaagcaaatgcagatcaccgtaccagtacagtcggcgtttcaaatcctcatcaagtcgtgcgccataagcatccaaaaactggtgacttgtggctggactgccatagtgggcaagtacatccgcaagatcataagccggatcgcccagcgccacctgctcccagtctactaaatacaaccgaccgcctgcctgtaaccaattcttgtggttcaaatcgccatgacaaaccgtttgcacatccgtgtgcggtaaccactgctttaaatcgtgcagagccgttttgatcttaggctgcgcagccacatcgactgggaaatcctgaagtagtgcgattcgtaattgctcaggatcaaggacttgaccgcctacttgacgtaataaccgttttaacagacttgagtggtgcacctgtgccaacattttggccacgactggcaacatcatttgttgccgcgttaacgtttcaccgtccagccactcttgagcggttagcacgtctcccgtactcacccgccgcgtccacaacagccgcggggtaatgtgttcaactgatagtgccgcaagaaacggcgaggcattgcgcttaaggaaatatttttgattggcataaaccccaagaaacgcacttccggtggatccacctgcaggctgcagggaccacccggaatctaattcaaactccataggcactactccttacttctggccgcaggaatgattcacaacatcaaaaagacactcccaggcgctcgtgcgtccacgctcaatattactaacttgcgaaattcacgtcaagagcagagcgcaaactggcccgcttagaaaccggaacataagcggccttaagcctaaacggccggtctttggccatttaggcttaaggtccttatgtgtaggtttctgggccagtttgcgcgtttaggcagagtgtgaactggcgcggttagaaaccggagcataagctgccacaagtgcgatggctgtactttgaccattgtgcttgtggtccttatgtgaaggtttctgcgcctgtgagcgcgtttaggcagagtgcgaactggcgcatctgtcattcaacgcatcgcatcatgtaccctcaaccgaacacgtgcataccatcgcgtgaagccccagacaaatgcagtcccgccaacaaatattgtcaacgcggcgagccactgcagtcggatcaacgcaaccagtgtgaaaacaaccacttcaagcagcaacaacgtcatcaaaagccgttcaaaggccgccagtttttgatttggtgctactggatacaagtgcgtgaagacaatttcatcatattggaagaagaatggcaacagctgaaagccaaccatatacaagaatagaatcgtaaagccaagcaacagccaccactgagacaaaaccgccacgataatcgcgccgatcaccagtagccgcaagtacaacccaagatactcaccgccacgcaaaaagccgcgcagatacaagtatgcccacgtctctgtcttgcttggcttaaccaacttcaaaagtggatcgaggtaccggcgacgatggacgctattggccaaacctggcacatccgtgaatagattataaaatcgatacagtcgacccatgcgatctgcttcgaggtcaattaaagcttcaaaattcaataacccatctgccaacaaggaacttcgcagccatctgaagaccaaattcagagtcagcgccactaacaaggccacagccggatgcaagtaaaaacctagaaaaagagctgcgaatgtgatgacaagcagtacaagtcgtggatgtcgccaattgatcggcagatgatagcgctgaagcaattgcagccacaagtcgagatctttgaataaccacacagctagtagcagcgtcaccgtcgcactgattggatcttgacccaattgtgcaaataatggccacatcgccaaagccgcaaaacccaataaagttgccggtaacatcatgctgtatcgccgtgccttcaacaaatagtcactgaaggcctctgcttttggcagtaagaagacttgatcgggcgcctgcgccaacgtggctaactggccaagcgcgattaaagccgtaaaaatgacagccagacacaaagctaaccaccaagatggttgcaatgttttcactagcagactgtaggcatataaggcaccaccaaaaagtattagcaagaccagtacaaaatggtcattgaacaccaatcgcaaatatttttgctgttcttggacatgttgtcgaagtcgagttcgccataacgcgaccattactgttcctccgtcattttcatatagatgtcatccaagctgccatcctgaagatcaaattgctgcttcaaagaaggtaaatcaccagttgctctgactttacctgctttgatcaaaacgaattcgtcagcatattgttgagcggttgccaaaatatgggttgacatcaaaatagacgctccttgctccttttttgctgtcaccaagtccaacagatcatggacggccagtggatcaagtccagaaaaaggttcgtcgatgataaaaagctgtgcatgcgtcataaacgccgccacaatcatgaccttttgctgcatcccttttgagaattttgctggaaaccagtccaacttattgtcgagtcggaacattttcagcatattatcggcatcttgccatgcaaccgtcgcatcaagatcgtaagccatgatggtcatttcaagatgttcccgcaacgtcaattccggataaagcaccggtgtctcaggcacatacgcgaggtcagctcgaaaaccagtgggatcatcgtgtaatgttttgccatcaagtgaaatcgtcccgctttgtggggtcaacaatcctataatatgtttgatggtcgttgacttgcccgcaccattcaaaccaattaacccgacaattttgcctgccggtacggtaaagttgatatctttcaagaccgttaaattgccgtaaccaccggtcaatccttcaattgttaaagtcatcttaccagtcccaatctgtataatttcagttagtgatatgatagcatgaaatcaaggtttctatttaaaaagcgcaagcagaaatgaggcagcaacatgaatgattgcattttttgcaaaattgtccgtaacgaaatccccaatgttaccgtatatgaagatgacgttgtcaaagcctttctggatatcacgcaggttacaccgggacatactttattagtccccaaagttcacattccagatattttcgcttatgacactgaacttgccgcagcggtttttgaacgtctgccaaaaattgcccgcgccatcaaggccagtgacccggcaattaaaggtatgaatattttgaataacaacggcaaggtcgcctatcaaagcgtttttcactcacatatccatttgattcctcgctatagcgatcaagatgattttggcatgcactttggcgatcacagtgcacagtatgacacagagaaacttgaagcggtcgctgacaaaattcgtacccagctggaggcctaagcatgaaatttaaacacggctttttactcggagcactgaccggaacagtttatgcgctgttgactgcaaaaaaaaccggtccacaacttcaacaagagatcgcggcctactttgaaggcttatcagacggagttggtcaggtgcgtgagagtgttgctcagttcagtcaatccctcacccatttatctgacgaactcaacaatactttgaaacctgccatgaaagatatcacagatcgggtcgagacttttgaatttgaaacggccccgcgcgttgatgcgatccaaaagcatgttgaaaatatcaatgatgctgtcagcaatcttgatgctatgccgactgccgatcagcgtgaacctttaccaaaacattgaaaattgccggcgatgtccatcaattaagtcgtgacggtttcgtgaaacttatgtgaagatccgcgtgcggcagtaagttatggtatagtagacggcagtgttaaccgaaacttttaagattaggatgtgtgattgcatgaaaaaatggattctcggcgttgttggtttgtttgtagcagtgacgttagctggttgttcaagcagcacggttgcaaacatgaaaggtgccaaggtcaccaaagacgagtactatgacgccatgaagaagaccaccactggccaagcaacattgcgtaacatgattgttttgaaggcattggaacaacaatacccgaataaggtgtctgataagaaggtcaacagtcagttcaatacactgaagaaacaatatggttcttcattcgatacaacccttgaacaaaatgggtataccgaatcaagttttaaggatcaaattcggacaaccttgtactcagaagttgccttgaaggccctcaaaaagccaacagaaaaacaaattgctgctcagtggaagaagtatcaaccgaagatcaccgtgcaacatatcttggtcaagaccgaagatgaagctaaacaaatcatttccgactaccaaaaagacccaaccgaaaagaactttgaggcccttgccaagaagaactcaatcgatactggaacaaaagataagggcggtaagttgacggcgtttgacaacaccgatactagcttggattcaaccttcaagaaagcagcctttaagttaaccaaggccggcgatatcaccacaacaccggttaagacgcagtatggctatcatgttatccgcgttatctccgttggtaaaaaaggcacgatgaaggaacacaagaaagatttggaaaaccagctctatacaacatggcagagcgaccaaaccgtgatgaacggtatcatcaccaaagtgcttaagaaggaaaatgtttccattaaggataacgacttgaaggatgttctttcaagctatctgagcaccagctcaagtaccagtacttcaaactaaaaattaaatcagtgttagcacttgaaagcctcgcaattaattttgcgaggcttttatttgtgttgcaaacatgacgcaatgaatggcaagtgattgtttgtaggactcaaaaaaggctgataaagataggcgctatcccatctttatcagccttttgacaaccacatgactacaactaaactgactgaattcgcctagtgcggatccggaaaagtttgaccatttttaggtcgatagaagcgacgattgtccataccgaaaagtcgttctgtgaaggtaccaggatcaacatgttggtaggcggttgtcatcatattgattgatgcgtccaattcgtctaaatcatgcaacacttgcgcttcaagcagctctggccgcaccggcgagccgtattcaagcaatccgtgatgtgcaagcacgacatgacgtagtaagagcatatcttcagcgttgatatcaattttaagttgctgtgctgctaagacaatctgttcgtcaatgagaacgatgtgaccaatcaagttgccttcaaccgtgtaatcagttgagattggcccgcttaactcaatggtcttaccgagatcatgtaaaattgcgcctgcatatagcaaacttttgttcaagctcgaatactgttgaacgacacttttagcaagtcgcaagatgcttagcgtatgaaaagcgagaccaccagcaaaagcatggtgatttgacttggcggccggataactgaaaaatgccttcttgtgatcattgatcagtttacggacaattcgattccagttagcattggtgatttcgaagatgtaactgttcagttcctcttccatatcactgggtgcttctggcgcccgctcaacaaaggctttaggatcattgccttcctcttgggttgccaaccgcaatgaaaaaatcttaatttgcggattgccttgatataattcacgcttacccgacaattggacgacttcgccagccttaaactgagcaatgtcattgtcgctagcatcccagaacttacctgaaatatgtcctgaattgtcttgaaaaatcatcgcaataaattttttgccattctttgcgacacgcacttcagctgatttaatcagcacaggaagccgaacatcttcttcattatgataatcgaaaagccgttttaccaaggtcgtcaccttttccttgaattttcacactacttaaatcatacagatatcaatgataaagtacaaggaaggttggtgcttgagtgaatgagaaaccatgcttcattgtcatacaaatgttaggcacatccaaggacgagtcagcgctcgggtaagagctggcacctaaccctttttaaaaataatggttggatactgcaaaagaaaatgcaccacctatgaattgccttttgccagcaagtttagttcaaacattgtcgcgacacgctcagccttctctatgcgcatgaatttccaaagaaaaaggatctccgcaatcaacggaaatccttcaatcaccagtcattacttgccttgatagacatcaataattggttgggaaataattttgttcaattcgtccatcatctgagataggccttgttcttttgccatcaaattttggatcggctggatgtcgcgcatcttgtcgccaagttcttgcaatgacttaacttcatcatccgtgaaatcttgtccctgcattgacttttgctgcatctcatattgcttttgttggaattgttggaacaaaccgtaagcaacggcgtccagcttcaagagatcaaacgccttcttgagatcctgaaattcctgtgttgtcttgatatctgccgccatctgattagcggtgtcgtaaacatttgccatactttacctcactttttgagcctatttaaaccagcccttgatattatcataccattgtcccacagtttgcttggcactgtctatgcctttctcgatactatcctgaattccttgccatgttttgtcgccactggatggtgtttggatgctagccatttgtgcggcatctttcgtgtcaaacgcggtttgtggcgtattcggcattaggttcgtcatttcgagtttaaataacggtgccaccccagacgtgctggtgccttgaaggaaatgctgactgtcagttgtcgggtagccaatccaggtcgcatttacaatatctggcgtatagccaatgacccactgatccttagtgccatagccccaactacttgggacctcagtactgccagttttcccggcgattgtgtagccagctggtttagcagtttgaccggtcccttcgttaaacgttccgatcatcatgctcgtcatttcctgagccactttttttgatatgatttgacgcatcgttggatgtgagttgtcgaccaccgtttgacctgacgcatcaacaattttgcgaatgaagtgagtcgttggaaatttaccgccattcgcaaacaccgcataggcccgtgccatcatcagcggtgaaaccccatttttaaggccaccaagtgcagcagcaagattctgatcgctttcttttagttggatgccaaaccgatctaagctagtgacccctttttgtacaccaatcttattaagcagccaaacagccggcgcgttgatcgaatcggctaacgctttatacatcgggacagtacctaaataggtgccggttgcattggtcggcgtataattatttttaccgtaactaagtttctcgtccttcaagacagaatcataatgataaccattttcaagtgctggtgtataaaccatcaacggcttgatcgtggaacccggcgaattgcgaagttgtgttgcgtagttaaaccctaagaaggtatgctcaccgcgattaccaacgaccgccctgacaccgcctgttttcggatcaagcacgatggaagccccttgaacctgcttaccatctgcggcatttgccggaaacgcccagtcttgagcaaagctgttttgaaggttgcgttgataagtttgatccaaattggtataaattttataacctttgttcaaaatatcatcgacactaataccttcactgcgcgcctcttcaatgacggagtcaaaataagacggatatttttgactgttggccgttgaaaaagtatcgacaacctgcactgactgcgcttttgccgcattggcctgcgcctgcgtgagcttcttattgtccaccatcaattgcaaaacgacattgcggcgcgacaaagcattgtccatgtgatcagcggggttatagtagctaggattccgtaacatccccgccagaattgccccttcactcgcatcaagctggctggcatctttgccaaaataccgcttagcagcatcttgaaccccccagaccccattgccaaaataagcattattgaggtacatcgcaagaatgtcttgtttggagtaaactttattcaactggatggccataaatagttcttgggccttgcgcatcaccgtctgcttttgcgtcagcaaggtattcttcgccaattgttgggtaatcgtactaccaccacccatgatttggccatggtggatgacataattcaaagcagagcgaagaatccctttgattgaaaaaccgccattggtataaaacgtacggtcttccgtcgagataacggcattttgtacttgcggactaatcgcctttaactcgacgtaggtccctttttggccgtacagtgtgccggcttcttcgttgttagcgtcataaatgacggtttttgtttgtaaggtactcttgatgttttcaacatcggcggttttggctttataagtaaaccaagcagagaacccgagcatgactgtcagaccaattaaaatcagccaacgaatcacctgaaaccggcggaaaaaccaccgtgttccctgccaaattcgtgataagaactgcatttccgtcctcctaatgtgaatcttgtttattgtagcataggcgacaaccgccaaaatttcatcgacatctttttaagcaaactttatggtcaaatgaattgaggaaatcacttgttgtttcaaacttctgcacgcgccacgctgcccaccagccttcgtgatcaacttcaagcatggttgataccacgtaaacggcaacaccaattgcgcgttgccaaaacaattttagttaatggtcattatcgtaattttaatgaaaaagtacagcctagtgatgttatcacgatgacttatgatgaacccacgccacttgcctacgttccggaaacgccggccctcacaattcattatgaagatgatgatctactcattgtcgataagccggctggtatgaaaactcacccaaacttaccaggcgaaaccggtaccttaatgaaccaggcagccgcttatctggccccttttccggcgttaattacccatcggctagatatggcgaccagtggtttattggtcatcgcgaagaaccctttaacgcaagccatcattaaccgacagttggctcttaaaaccatgcatcgggattatatagcgttagtaccgcagggaattgcggccagtggcaccataacggctccgattgggcatgatcctgatgatcagcgtaaacgcatgattagaccggacggggcatcggccattactcattttctccggatcgcagaaacgtcaacaactgcgacggttgcgctcagactcgaaaccggccgcacccatcaaattcgggtacatttagctagcattggctatccaatcctaggtgatccgctttatgcccctgatcagacaacctatcagcgcatgtatctgcacgcctttcaggttcgcttcacaaagccgctatcagacacaacgttgacggtgaccagtcccctgcctttttgaacaattttgagccaaagtaatggcacataccatggcaagcagcgggccactaattgtgtgacaacgaaaagagctgggtttgacaaggttgaccttgttgcccagctcttttgcttgtgatgttgccagatggttacgaattgaaggcttgccgataagccgcttcaaaccattttgcctgcttctcatccgggctaatcacgacaatcgtgtcatgaccagcgatggtgccgacaacttgctcaaaaccgatgtcatcaataatcgctgccaataaattgccgttgctcggtaacgttttgatcacgttcatgaaatgcacccgagtaattgacagcccgacttcgcgaattgagcgacctaaccgttctaactgggactctgaagagccgcgaaaaatggtataacgtaacgtcccggttgcgtcctgcgatttgacgatcttcatctcgcgaatgtcgcgcgaaatcgtggcttgcgtcgcatcaataccagccgcttttaatgctgccaataactcttcctgcgtggcgattggcttttgattaatgattcgtgttaaggccgcttggcgttcacttttattcatcacatggcctccaccattattgttgcgcgggagtcagtccaagagacatcggcgtgtaagcggccttagatgtgatggccgtactttgaccattgtgaccaaagtccttatgcgtaggtgtctggactgacgagcgcgttatcgtcactgccggttgctgacgcgcaaggttacatttcttctggcgcaccgacacccaacagttgcagcgcatttgttagcacttgtgtcgtcgccttaaccatcgccaatcgagctggcagctcactgtcctcaaccagcactttgacattggcataatacttattgaaagcttttgccaagcgtagtgcatacttagcaatcacagaaggttcatattccttggctgcacgcaagaccatgcttgggtaatcgccaagggcgcgcaaaacgtcccaagccgctggatcacttaaagccacttcaggcgccgggtcaatcgcagccttccgcaaaatgctattagcccgcgcgttcgtgtactgtacatatggaccagtttcaccttcaaaacgcacgacttcttctaagttgaagtcgaagttgtctaagcgttcgttcttcaagtcatggaaaatgacggcgccgacaccgacttcatgcgcaactttatccgcatttggtaaatcgggatgcttttcagcaatttgttgtttcgccagaccgacagcatcgcgcaaaacattttccagtaagataatgttgcctttacgcgttgacaacttcttgccattcgccgtaatcagcccaaatggaatgtggtgaatatcattcgcccagtcgtaacccatttctaacaagacggcttttaactgctggaagtgttcgcgttgttcattaccaacaacgtacaggctttgaacaaaatgataatgttctttccggaaaatcgcagcagcgagatcacgcgtcatatacagcgttgcgccatctgacttcttgatcagcgctggattcaagttatacgcactcaaatccacaatttcggcaccttgactagttttcagcaaatgcttgtcttcaagccgcttcaccacatcagccattttgtcattataaaaggcttcgccattgtaagaatcaaaatcaacaccgagaattttgtaaattcgattgaactcagccagtgaaactgtgcggaaccagcgccaaagcgcaatggcttcttcatcgccatcttccagccgcttaaaccaagcacgggcctcatcgtccaactcgggatttgcctcggccttctcatgaaattccacatagtaatgcaatagatttttgatcggatcggctttgacagcgtcctcggatccccacttcttgtacgccacaatcagtttaccaaattgtgtgccccagtcgccaaggtgattaattttaatcggtgtatacccgattttgctgagaatgttggctaaggcattgccaatcacggttgagcgtaagtgccccatggacattggtttagcaatgttcgggctgctcatgtcgatcggtacattcccgctgccgatattagcatcaccataatgctcgccagcttgcgcgatcactttcaacacatcgtgggcaaaactgattttatccagataaaagttaacatagccaccaacagccttcactttttcaaacggggtcacatcaatttgaccgaccaaatcgctcgcaatcatctttggtgcgcgatgcatgatcttcgccaaggaaaaggttggaaaagcataatctcctaagtctgatgatttgggtgtttcaatcaaggacttgatcgcagccgcgtctaattgaccggcaagtgctggttcaagtgccttaacaacaagttctttaaaatccataacttcctcctaaaatgatgatgccacgaaaaaaggacccatctctcctgttcgaagagacgagccctagcccgcggtaccactctgcttgacaatatgtccactcaaagcactgattctcaaaagcgcgccatcaggtccgacgtgatcgtttgcactatccgatctcactaagaaccgccaactgaccttatttcctctttctcacagaaccttatacagcggtcgacgagaatcgaactcgcgacaccagcttgggaagctggagttttaccactaaactacgaccgcaaatcaacggatataagtatatcacgagggctacattttgcaaaggtcatcaaaggtgactttttctatgaatttgatgagaaaaaatcttaaaaatgagtaccggcaattttcttgttaatgtttctcaccgtgctataatattagtaaagaaggagtggtcgagatggcaaaaacgggacgtcactattatttcgtggcgcgcaacgagaaaaccaaaacaggttatcacattagttttccaaatattcctaacgctgaggcagtcgggacaacatacgaagagaccgtttattattcatatcgggtcttggctgacttcctgagccatctgccaaaacaagaagcggaaattcgtgcctacacgctttccgatattccggatacggtttccagcaatgttttctattcattggtgagcgtcacgcctgactttgatccgcacaaaatggaaacacattttaccttgccacaaacaccgcctgccgatattcgacaaaaagcagctaaactggctggattagtgacgccaaatgataacttggctttgtaactaggtattcaacatgcaaacttttcgaatgttgttgttagttatttttcttgttggcgttgggttagctttgatcggcctagtaagttggttgattgccctattgcgacaccgcgaaacaaaaccgatgcggcgactgacttggctgagcggcggagtggcgcttgcggcgctgattgtcaacgcgtttacgtaaacaactttgatttaagcgataattcttaagtcatcatttcaagaagagcactgccagtgatgggagtgttttttgtttgggattgcacggaatggtcgtgcaatcaaatcgagaatgaaaattgaacgttgttgcttcaaaaacgcgttcgctgccgcagaaactggtgtgtaaggaccttggaagcaatgaccaaagcccggtcatcacgtccaaggccgcttacacgccggtttctaaacgcctcagctcacgctctgaggcgttgactggtttctattgtatttctatgcttaaataggaacagcaaataatgaaggagtgggcttatgactgacctgcaaacaagtattggcgactttcaatttgataatgtgttcatgaacgcaagcggtgtacgctgctacaccgaggaagacttagatgcgttggcacaaagtgatgctgggacctttgtcactaaaagtgctacccaagcaaaacgcctcggcaatcccagcccgcgctatgctcgactagaactcggctctatcaattcgatgggcttacctaatgagggcctcgattactatctcaactacgccttgaagtttcaggaaaagcatccaggtcaatggatttttctgtcagttgccggcttgacaatggaagaaaatctcgccatggcacacactatcgaagactccgattttaatggcttggtcgagtttaacctgagctgcccaaatgttccgggtaaaccccaaaccggttacgattttgaccgaaccaaggaagtgcttaccaacctcttcacgttctttaccaaaccagcaggcgttaaattgccaccttattttgacctcgcgcaattcgaccaaatggctgccatcttaaatcagttcccgttgcaatttgtgaattctattaacagtctcggcaacggcctcatgatcgatcccgaaactgacacagcgttaattaagccaaaaggcggctttggcggtattggcggcgcctatgcgaaaccaatcgcactagccaatgtccgtgccttttcacagcggctggacccgaagattcagcttatcggcactggtggtgtgaccaatggccgtgatgcctatgatctcatcctcgccggtgcgagtttggttcaagttggcaccttgcttcaagaagaaggaccggccgtattcacccgcctgagccgtgaacttcaggctgtcatgcagaccaagggatataccaaccttagcgactttaaaggacaattgaaaacccaatgacgaacgaaaaaatgaaggtttgggcatactttaaacacaacgctggcgactttagccggcattggggcgcgtatatcatgctcatcagcgtcactaatctatttattgggttagctgtgatcccgttttttaattttgctgctcagcaaacgttgcgaattggtcacgtgccttacattaccttgacgaacctcggacaaattctgactcatgatcccggagttgctgcagttctcaccttgttggggctgctactactgttattcgtttactggcagttcaccttcttgattctaggtattcaaaacattcatcggcaaactcgcttaagcttctttcaattagcaatcgcgactttgaaaaaaacccaccgcctaacaccgacaaccatcgctgtcttaatcgcttactttgttttaatctttccattttcaagcgttgttttcaaaacaagcttgctggccaaattaaccattcccgatttcatcgtcgattttatttttgcccgatggtatctcggcctactggtcatagcgctttacatgatgggtacctggctcgccgttcgcttgttgccgttattacctgctttaattttgagcgaaacccctcctcgaaaagcggttgccaaaacttggcggatgacgcgcggccaaacttggcgcacattgttagcagtcttgttaatcttcataccggtagctgttctgaccactttgctgaccattggcctatatttacttcagtcatacttggacagtcactgggaacattgggccttacttggagcaaccatcaaccttggtgtgttgcaagtggttatgctgctattaacagtgttctttaccgttatgctttatcaattgggaacctcgcaggcagagacatttcaactcattcccaaccaagacttgattgcccgagtcccaaaacgtcggcgcaatcttcttttccgaattggcgccgttggcttaattgcgttagtcatcggtggcagcagtcttttctactacgcttatctgactggtgcactggcaagtcagccgttaactatctcacaccgcggggttgatgatggtaacggagtccaaaatacaatcccagcgttacaagccaccgctaaagaaaaaccggattatgttgagatggatttgcacgaaaccaaagaccatcaatttgtcgtcatgcatgacgagaacctgaaagatctaaccggtgtcgatgccaaaccacatcagctgactttatcagagatgaccaaactgacagctcgcgagaatgggcacaccgccaaagtcgctagttttgaccagtatttggcggctgcggaacgactgcatcaaaagttattgatcgaaattaagaccacacctgaagacagcccacaaatgatgaatcattttattcaactatacgggcaacgacttctagccgatcatgatcagttgcattcgctcgattatcaagttgtcacaaccatgcgcaaacaagtgccaaagttgaaaacttttttcattttgccgtatacgctcgtctttcctgaaacaccagctagtggttacacacttgaaacaaccacgttagccatgcgggtgattgacgaagcgcataatcgtgatcaaaaagtctatgcttggactgtcaatgacagcgatgatatggaaaaagtagctttcatggatgcggatgggattatcacagatcaattgggtgaattaaaaacaacactatatcaaatgaaccaccatccaagttatgctgatcagattttgcaatatctgacgagcttttctgatgatgctgaaaactagctatctacaaataaaggcaccaaaaaaggccatcaacttttattcgttgatggtctttttagtcatttacttgaagtaatacctagctgtttctaatgcgctggtttccatcaagcgtttgccatactcagacagcaccgctgatgacaacggtgaccgatcgccaaattccatcgcgacggccatttgatcgtgcgcctcgtcagacgaaatctcatttggataaaaggtcagtaccagataataagcgttcttataacgataaagatcgctctttccgccttcgagccgcaatgtatctgctaaactaataaaatcttcaaagtcctttaatttcaaaacaagctcagtctgtggtgctttgtcggcatcaatatagccgccttcatcaactgcctgatgatcttgttgatcactggcatcaagtccttgcagttgctgacgaatataatcaggcacctgggtatccgtaccttcgtcatcagtctgatcggctgcgctatcatcgtttttttgaccacttttactgatcagcaattcgagtccggactgactcggcatgacctgaaacgtcacggcctcatttgtagcaaacgtatgatctttatcgacctcatcgaggatactatagaagaagctctcaatctgtttatgattgcctaacagatccaaaaccgtgatcccacgctgcgctagatcatcgttgcctaacatgacccggatcgtatttgcgttaatccgttccatttccatgattgctgcacctcactttagtcacggaaccctggcttctgtgaatatcacattaccacttactacattatagcagatttcgtacgtcaaggcattctaccgcaggttagcgtgagtatcaagtaaagcgcgcggtcttcaaacttggttcaaccttcactctagtaacacttgttttatcaacctgcagtaacatcgcgtttgcgcctttcatacgcaaaaaccgcaccaaattaggtacggtttttgcaaatgattggctcatttataattagttttttaaaaacctgcaagtagttgtgcttgttgcagctccattgttcggacagaacgcggcaagaaacgccgaatttcatcctcgttataaccaacctgcagacgtttatcgtccatcataatcgggcgacgtagcaagccaggatacttggcaaccagcttaattaacgtaccagttgacaagtcatcaatattaatacccagctcctggaagattttcgaacgtgttgaaataatttcttcagtgccatcttcggtcattctcagtaaccgtttgatttcatctacgttcaatggatcagaaaaaatattacgttcctcgaatggaattttattttccttcaaccaggcgcgcgccttccgacaagatgtgcaacttggggatgtatataaaataaccattagcgctcgctcctttttcgtaacgaggtacttttcatctctacaggtatagtataagagattggaccggcgctaagcaatcacatttagaaaaataattttttaaaagctgaaattccatattaacgaatattgactattgtccattttatcaacaattatgcttattcatttgcaataaataatacacgttataataacctcgatttacacatcttgttatcattttaaagtaaggcttatcaagagtatcagattgagattgtcaagtcatcctctgccaattgaattggtatacccccatcagcagtctgtgcttgctgtttcaaggtgacaagatcaagctgttgcggcaaatgtgtcaataataagcgctttacttgagcgtctttggctagttttcccgcttctggtgctgtgagatgccaacgcggttgtggctgatctgctagaaaattggtatctgccatcaaaagatccgcatctttagaaaacggtgccagtgccgggaaacaacgcgtatcacttgtattgacaagtgttttaccagtgacgtcttcaacgattcgaacagcaaacgctggcaccggatgttgggtttcaaggaaagttaacgttaaagggccgagatgcaaagtgctgtctgccgtatagcctttagccgttgtataagggccaaacgttaaactagcaaagttcaacgggtcttttgtatgcccatatatcggcaacggtgacacctttttgtccccttttcgcaattgataatagtactgcaaaacaccgacatccgcgatgtgatcatgatggtagtgagtcaataaaactgcatctaattttaatggatcaaactgctgctctagtgaaagcaagccgccgctacctaaatccatcaataaatgatagtcaccactttcaataaggtaagtgctggtcgcgtgacccgcatctgggtagccgccaagataacctaaaactgtcaatttcatcttgtttttccttcctttcaatgtgaaaccattcaaaaagcttataatggatttggaggtggtcagaatgtccacaatacaaacagtcttcggcagcaagtcgttccttgtcaaactgctagacgaacgtcatgacccgcaattgaaactgttgaaaccagctgaagagggtttggattacatgatctatgaccccagcggaaaagcacacttttccgcgcccttgcaatatgaaacccttgcggatttaggtacgcccgccgacaatggttatattcacttcatgtactttaatttgagtagcgatgacgtgaaagttttccttgccaaaattaaggatctcattgataagcatgatatttttcttggtcaaactcaagtcttagtcgcccagaaagtcaaacacccagacgactttgtggtcgtatcaggttggcaatccagtaacgactactacgagtttaagaatacgccggccttgtcagcagtcaaggagttcattcgtcgcgcggcctccgcaaacggcttccatcaggctggctatgcggtgattgatccgcatcagaaaaactaaataagttacatagacggcttgttaacgcctatgaaaaatccgaagtcaatcacttcggattttttattggcgcctaatgcgctttttaagaatgcactcgcttgtgtaattattcagatagcccacggatagcgccgtagctaatcaatcgcccaacgggaaacaggttcatctaccatgcgggcagtaatgtgcacagttgcctcataaaaaagccaatcgataattgcatagatcaaaatcatcaaacccaaataacgcgaaggcggattatcaagataagttgtcaaaacactaatcatacaaagcccaattgttgtcccgaaaagaaacggtaccgcaaagacaaccgcagcttgccgataaatcgttatacggagttgccttggatccataccaagatgttttaaaatttgaaaatgtcgggcctcttggcgagctgcaatcacctgttttaaaagtaaaatgctacccgtagccacaacaaaaacgccgccgagcaataaaatcagaaagaacaaaaagccatacaaagtgttcacaattccctgctggaaggactgaattcccaacggattgcgccaaaagttcaaggtagtgctggctcgatctgtcactctcaaatcattgccatcccgctcagaactgccaatattgacatactcttgaagattttgactattctccaagtgctgtaattgtcgcaacgcagcggcggttgctttggacttaggtaagcgagccatatacaatcgatcagtcgttccttcaagcatgtcaaacgtccgatcactgacaagcaacccccggtcaaaaaaattgtttctgccggtcgggaaaagattggttgttcgtgttaacaataatgacgcatcgctacccggcaatatgatggctcgatcaggattgcggcgggcaccgactggtcggaaactggttcgcgttggcagcattagaagtgcttcgttcccacgaagtctaacaggagctaaatagtgctgtaagtgggcagcgcgttgataatcccgcatcgcaatcacattataaacaccaggttgttttcggacctgatcggcctgatctcttagtcgaatttcggcatacacaagtttcgaagataggataattgcttgagttggtttgaccttagcttttgctaaaattttcgtgacattatccacgcctgcccctgctgcaaccacagtcgtcggaatctcgcgctgaaccagatcctgattatattgaaacaacatagcagaactgccaagcatcgtaatcgtaatcgcacacagcaatgttgttagccacaatgaatgcgcgttcccttgaagtcgtttaatgatcaaatgtcttgagatggcatgcgcattgcgcgtcttcatttgacttcgttgctggaaccaagccactatgccaggcagaaactcctcaaaaacgaggaaaagtcccagcaacaaagccactagcatgaatcccattaacaatggtggaatcaaacgcccctgagttcgcggcagtatatgcatcaacacgccactaactggtaacaaatggaccatcgtaaacagactgccagccaacaaaacgacgccagcaatgccaagggaaaaccgccaccatgtttgcggtttgggagcggccgagacatcctgctggcgaataaaattacgcaatgggttttgaacataaatggcattgatgctgcccactaataggtagacaacgcccattaaaatcacgacatcaaccatagctgggaaagagagcatcaaactaatcggtgtgtgcaaggccatcaatcgaatcagcaccatgcccaataaaggtgagataatcaatccgagtaagagacccagagccattccgaatataccgatcattaaactctcaatacagactaacaatcctaatttggccccagacaaaccaagcaaacgatatagcccaatttctcgatcacgacgagcaatgagtaaagtgttgaaataaagcaaaaaactgatcgcaaaaagtgctaagaccatcatcacaatcatcaatagaatcggaacaatatccagatccccaagccgcttgctggcatcgctcaaaatcggttcattattcgcaaccgccccaatggcatacataacggcactgatcaatgctgccactagtacctgcaagccatcctcgtgacgatggcgccgtaaatttgtcttaatcagatgccacacgggtatggcctcctccactgacagttgcttccatatcaataattcggtcaaaaaactgctggcgggacttaccacgcgttacttcagcaaaaaatgccccatctttgatgaagatgatgcgacttgcgaagctcgcggtgaagggatcatgcgtcaccatcaatatcgtggttttttctttttcgtttaattgacgcagatagtttaaaaaatcagttgctgctaatgaatcgaggctgccagtcggttcatctgccaacaaaagatcgggttgggtgatcacagcgcgagcagccgcgacgcgttgtcgttgtcccatacttaactcccccggaaaagcctgcagaatgggagttaagttaaggtgattcgcgactgtctgtaatcgttcagcacgatcaggctgaagctcttgctgcaaggttagcggcaacaaaacattttgcgtcaccgtcatatcatccaataagttgaagtcttgaaacacaaaaccaagatgatctcgacgaaaagccgcttgttgtcgttcattaagggcctcaagatcgttccctgcaatattgacttttccggtacttggcgtctcaatcgttgctaaaatattgagcaatgttgactttccggcgccacttggtcccataatgccgacgaactcacccgcgttgacctgaaagctaaggtcgttcaaagcgcgaactcgatcatgccgttgtccaaaaatcttgctcaagttagatacttcaagaattgccatcgcgcacctccgccattatcataccaaaaacgtgttatgcatgtgctgccaactcccgttagacaaagaatctcgggtttgttgctcttagtttacattttaaagtaaatcctgaaaacttatttattagaagattgcggcttcctaaaagccggacaaacccagctcataaaaactggtcttattgaccttgttcgcgcttgtgcttccttcccaaaacttataccattagagcagaaatggagttggtcacgtgtttaaaatcatgatcgtagaggacgatcagacgattagtgggctgatcgctgataacttaaaaaaatggcaatttgatccagttgtggtaaccgattttaatgctgtatttgatgactttttgcaagaaaaaccccatttagtcttattggatattaatctaccagtttttgacggctattattgggttcaaaaaatccgtgaagtatcaaaggtccctgtgattttcatttctagtcgtaacacgaatatggatatggtcatggcaatgaatatgggcgctgacgactttttgaataagccgtttgccatggaagtgttgatcgcaaaaatcaacgccttgcttcgacgaacctacaattatgctgatcaaggaaccgatgttttggaacacaacggcttgatgttgaacctcaaaaacggtatggcacaaattggcgaaaacgaaattaacctgtcaaaaaatgaatataaactgttacaaatcttgatccggcaacacggtcaaatcgtcagccgttcccggttattaaaggacttatggcaagacgagcgatttgttgatgacaatacacttaccgtcaacattaatcgcctgcgcaaaaaaatcgaggaagccgggttgaaagattatattcaaaccaaggttggacaaggttacatcgttccttaggaggctggcagatgcggtttcgtgattatttaaaggatcatttaagcccgattggtggctatattctttgtgttggtctggcggccttgatcatctggcttgacccgcagcatcgcgttaaggccatgacgctttggtacgctgtgttgttagtgacactattggccagcgcttttttgatcgcacggtattggcgcgtacggcggttcgcagctcggcttcaggaacggatcgatgctcaggaggctgcgttagattggcccttgcctggcggtgaatccgcaaccgaacaacttgtgacgaaaacgtacaatcaaattttgacccagcatcgccaacaagtaactgccctgctagcacaacagcaagatcaaaaagacttcattgattcttgggtgcacgaaatcaaagtaccgctcgcggcagtgacgttgctggccgaaagttttgaggggcaagtacctgatgacaaactggataatttgaatctgcaattggatcaaatcgaattttatgtcgagcaagtcttgtattactcgcgtctcgacagcttttcaaaggattatttgctgcatgagacatcattgcgcccgctcatcaatgacgtagtcgccaaccagcggaacggctttatcaataaacgactatctttcagactgaatggcaccgatcaaatcgtattgacagacaacaagtggcttcgctttattcttgctcagctcatctccaatgcggtcaaatatacgccagaaggaggccgaatcacggctctcattcgtaacaccgggaaggaaacgcaactacagattactgataccggtatcggcatccccaaagatgagcaacatcgtgtttttgagaagggattcacgggcagtaatgggcgcctttcgaatcataagtcaacgggattaggcttgttcttggctgaaaagttagctgaaaaacttggccatcacttgtcgttaacctcggtaatcaatcaaggtaccacggtcacaatccattttccttacgtgagctattatggtgaggccgatcaaactgtgcaccatcctgaatcccacgcgattgctgtgcaaacccagactaggtcacatccagacagctgacgaataagatagcatcaagtagttgaatcaaccctagatctcaaaattgagagccacctattcaaccaaatcggcaccagaggcaagcagcctctgatgccgattttttaatagattatcttatcgtccttcgaattgcctgaacgaactaacgaatcagatttttccacaacttgacttcgccagccgccattgttgctggtacgtcaatgatgcgctggttagcactgccacgaaactgtaaggtcagatccttttgcgccaacaaaaagcgaccgtcaaccaaaatatcgatcaattttagcaactcaagtttatcgtctgaatcctgaatcaattcatcatacgtatagccgctccagctccaaatgtctttctcatgcccgaattcttgacgaattcgtttgcacaagcgaatgcagacttgcgtgttgaggaaaggctcgccgcctaacagcgtcagaccctgtacgtaactttgactaagatcggtcatgatttgatcctcaagttcttgtgtataaggtttaccataacgaaaattttgtgcaacccgattgtagcaaccagggcaagcgaaacggcaaccggagacatataaactacaccgaaccccttcgccgtcaacaaagttaaacggtttgtaatcggcgatgcgttgctgtgaaagctcactggcaagccattctttaggtttgggattttggggtaatttattttcgatcatatgtctgccttccttgagggtgtgccaacccacgtggtgtcacgcacccagctgtttagtcttgtgaatccacttttttcatcgtatcacgtttcacccccaagatgtagtatcagttgtacacaaaatgccggcctgtcatctatatcttgacgccaggccggcattctctgatgctatacgtcatacacgtgacttattaagcgcgctttaagtgcagtgtcattgcattcaaagccacaacaatcgttgacaacgacatgatcgcagcaccgaccgcaggactgagaatgaagccaacgggggcaagaatccctgcagcaagcggaatcgccagaatattgtaaccagcaccccaccaaaggttttgaaccattttccggttagttgcttttgccaatgacaagaagttgagaatatcggccgggtcactatgaactaagacaacatcggcggtatcaatcgcgacatccgtcccagctccaattgcaacaccgatgtctgcttgagccaaactaggcgcatcgttgaccccgtcaccaaccatcatgacaacgccatgctgttgataagccttcacttgcgcaactttgtcttcaggttttaactctgcctgaaactccgtcagaccaagctgaccggccactttcttagcagtttcatggttatcaccagtcagcatcacaggcgtaatcccctgctgtttcaactcggcaacaaatgccttactggaagacttcaactgatcgccttcagccaccatgcccaaaacgtgctgacctttcagcaaaaaggctaacgaatttccggcagcagcccactgatcagcctgggttttatcgtaggtcaactgatgatcctgtaaatatcgggcattcacaatctcatactgaatgccgtcgactgtgcctgacagcccgacacccttcatgacctgaacattttcagcagctggcactgttagcttttgctcaattgctgccgctttaatcccagttgcaagcggatgctcggaatgactttccaaggcggccatggttgctagaatttcttcctgactctgatcagcaaaatgcaacgttgtggcaaccgtaaacttgccttcagtcagcgtccctgtcttatccattagcatgtacttggctcgcttggctgtttcaagcgcttggcgattgcgaatcaacaacccattcgtggcgccaatactggtactccgagcaatgacaagcggaatcgccaaccctaatgcatgtggacaagcaataatgaagacggtgaccatccgttcaaaagcggtggccaggccgcttggcatccagagaataaacgccagaataccaatagctaacgcggcatagaacaaccagccggcaactttgtcggccatgccctcggccttacttttatttgcttgcgcactttgtacaagcttcattacttgggctaaatagccgctttcaccagtacctgtcacttggatttcaatgaccccatctccgttgatggaaccaccaataactttatcaccgcctgccttacgaacagccttggcttcgcctgtgacaagcgattcattgacactactgctgccgcttacgatttcgccatcagctggcatttgttcaccagccaaaacccgtaatcgcgtgccaacctgaacctctgacaatggcatatccatcacactgtcgccatgaaccacatgcgcctgatttggcaataatgcagccaatttttcaaccgcattaccagccgccatcacagcattcatttcaatccagtgacccagcaacatgatcacaattaaagtggccagttcccagaagaagtccatcaccatagcatgtggcgcgataaagtgattcatgacgaaagcataaagcgagtaaccgtacgcaacggtgatccccattgcaatcaaagtcatcattgcgggctggcgactttgcaactctgatttagcgccggtcaaaaatggccaaccgccatagaagaatagaaatgacgaaagaatcaggacaagccaatcagacccaggaaaaactattggcaattgcaaaacgccgaggtggatatccatccccatgaactgcgaaagcaacaacacgggtatcatgacgatcaaactcacccaaaacttttgcttgagatttcccatatgcatcatgtgacccccgccatgatccatcgagccgtgatccatatgcatgtgcatgtgatccatcgcgccgtgattcatgtgcatctgatccattgctgcatgatccattgaacccggttccatctgcatcttcgccatgccagcatgctcttcttcagagtcgtgatccatgtgcatgtggtccatatcgccatggtgacccatcgccatatgatcgtggttcatttgatcttttttgtcagtctgtgatcttttcgtatcgttcatcgctttcatttcatcgtcattcatgtgcagcctccttacaaccttctggtaaacaattacaactaactgttttcggcgcatcgtgctgcttcgctaaaagcgtttgttgcaagatctcaatatcatgtttcgaaagggtgacgttcgtcatcaagtgattgatggccgtgccgattttcatttgacaaaggtggctaaataattccgccacggcggcatccatagactcttgttcacccactgcagtgtgataaagaaattcacgtccatttttttcagtggttaaggcgccttttttgactaaccgtcctaaaaaggttttggtcgttgccactttccagcccattttttcagcaagaattgttgcaagcgtgctacttgtcagtggaccaagtgtccagataattcgcataacctcccattcagactgggaaatttcaactttcggtgtttccatcgcttgcctccgtttacatctgtaatctatcaacacctttaatttacaactgtaaaccataaaagtcaaccgcagtttcttgagcgcacaaaaataccccggctagccagccgaggcgcgattgtattcattcacttttacagtgtgtggaacccaatatcagtgcgataatccaaaacgccttgaattttctccatggctgtttttgccgctttaacggcatccggcaaagactccgccccagctactacggagaagattctaccagcatgactttcccagccgtggtcacttttcgccactcctgctggaagccaagttccctctggccaatctgtcggcacaatgacgggaactgtcttgagcgcgctgctcgggtacgcaggattaacggcaacaaagcaagcataggccttatcgctcaacgtcaaactaggttggcggtttgctaataagtcgctaatcagttgataaaaatcatttgtgatttgcggcagcaggacttgcgtttctggatcgccaaaacgcatgttatattccaaaatcttcggtccgtcaggtgtgaagatcagtccaatgtacatgaccccttgaccatctaagccatcagcctgcatgccctttaacgttgcatccacaagctgatgggcagcggctacttgatcatcgttaaattgcggtaacggactaatcgcccccattccgcctgtattaggaccacgatcattggcaaaacgccgcttgtgatcctgagaaagcggcagaatgacacgcttttcgccattaaacaaggccatgacagaggcttcttcacccgcaagatattgctcaagtagcaccgttgcatctggagaatcggcatacattttttcgatcgtttcatccagcgtttcagcatcttgggcaatagcgacgccttttccggctgccaaaccgtcctttttcaagactagtggcaagcccattgtcgcggcttcggcatgggcatcaatagcattgtgaaccgtcttgctgccggcagtcggcaactgatggcgcgccataaaatccttggcaaacgttttgctggcctctaactgggcaactttcttggtgacgccaaaaatcggttgatcagctgcctgaaaagcatcgacaatcccagcggctaacggcacttcgggacccacaaaagtcagatcaatttggtgggtctcagcaaagtcaatcaacttggtaaagtcattgtcatcaatgttgatcggatcaactcccagcaaggtcattgccggattacctggcgccacatagacatgatcaacttgcggagactgtttgaattttaaagcaagggcactttcccgggcgccgccgccaatgatcaaaacctgtttcatcgtaacctcctagtgtatttgctggtggggaagctttataaacgcgcctgtttttctcttaaatgcgctcataggcgcggaaacctatacatcagaaccttgaagctatctggccaaaacccagccagttcacctcaagaccacttatgctccggtttctaaacgcgcctgttcacgctcttctttttaatgtctaaaatgacggacaccagttgtcaccatcgcaataccgtactggttagccttttctatagaatctttgtcccgaatactgccgcctggttggatgatggctttgatatcatgcttagccgcgtaatcaacgcagtcgtccattgggaagaaggcatcactggccatgacggcgccagcaaagttgtcgttttgttgggcctgggtgagggctaactcaaccgaaccaatccgattcatttgtcctgccccaatgcctaacgtctgatcagcttgggcaacaacgatcgcgttactcttcacgtgtttgacgactgtttgcgcaaaagcaagtgccttgagctgctcgtctgtgggtttcaccgttgtcacaacagtcaaatcagccggtgtttctgtctgattgtcccgcgtttgaatcagtaacccgccataaattgctgtcgtctctgttcctaattcagccggcgtatcagctgtattgattgtaagcagccggacgtttttctttttggccaacacagcataagcatcatcatcaaatgccggtgccataatgatttcaagaaaaagtttgtgcattttttcggcagttgctagatctacaggccgattcaaggcgatgatgccaccaaaaatcgacatcggatcagcagcataggctttgtcccaagcgccttcaatggtttttccaagaccaatgccacaaggattcatatgtttgacagccacaaccgctggctcggaaaattcacgaagcatcgctagcgcagcatcagcatctttgatgttgttataggacagttctttaccgtgcaactgtttggcagcggcaaggctagttggattcggatcaggttcaacgtaaaacgcagcttgctgatggctattttcaccatagcgcaaatcttggcgctttgtgtaggtcggtgtgaagtgctcgggaaatggctcaggatcaagataatgcacaatttgagcatcataagccgctgtgatggcaaagaccttagcagccagcttttgacgcagatgagcatcgtcttggtcaaggccggttaaaacagcctcgtaatcggccggatcaacgactgcccagacactgtcgctatttttagctgctgcacgtaaggcagaagggccaccgatatcgatttgttcgatagcttctgcccttgtaacatctgggcgtttgattgtggcggcaaacggatagagattgacacaaaccaaatcgaccggttgaatgtcgtggtcagctaacgcttccatatgggctggatcatcgcggcgtgcaagaatgccagcatgaatctttggatgcagtgtcttcacccgaccatcgagcatctcgggaaaaccagtcacctcttcaacgctggtcaccgcaataccggccgcagccagttcgcgatgcgtgccgccggttgagactaattcaaatcctcgatcaatcaaacctttggcaaaagagaccaaacctgttttatccgaaacacttaacaatgcacgcttcacttaaatcgctccttcttgaatgaggttcttcacagttgcagggaaaatttgatgttcttggcgatggatcgcctgctcaagctcggctaagctcataccatcagtgatattgactggcacttgggcgataatctcgccggtgtcaatgccagcatccacaaaatgcaccgtgacgccggtgactttcaccccgtagtcgaaagcatcctgaataccttggcgccctggaaaactaggtagtaaagctggatgcaagttgatgatttttttagggaatgcccttaaaagggttggcccgatgatacgcatgtaaccggccaaaatcaaggcagatactggcgataactgttctaagatggccgtctctgccgccgttttattaggatagcttttaaaatcaactacgatcgtcaaaatgttgcgtgcggcagccttttgaatcaccggcgcctgtgattgatcacaaaccagtgcggcgatgcgataaccgctatctggttgatcagcggcatttgccaacgcctcaaagttggtgccatgaccagatgcaaaaacagctagatctttcatcgacgactcacctgccagtgcagcttttcgacaggatcttcgccaaccgtgccaatcactttactactaggaatcgcgtcttgaacaagactaaccgcttgttctggcacgacaaggatcatgccaattccaagattgaaggtactacgcatcgttgtttcacttaaatgtccggcatgttgcaaacgatcgaacaactctggccgttgccatgctagcggatcaatgtttgctaccaaaccgtcagggatcacccgcggcaagttttcagtgatgccgccgccggtaatgtgggcagccgcgtgaatcaatccttgctgcatgagcggcaacacctgcttcacataaatccgagttggccgcatcagcgcattcagcatttccgatccgtcatcaagcgattgactgcctaagtcggtttctgccagcagcttacgcaccagtgaataaccattgctatgcacacctgaacttggcagaccaatcaaaacatcgccagccgccactttttgcggcaggcgttttgaagcggaaaccaaaccaactgcgaaaccggccaagtcgtaatgatgttgtgggtacatgtcgggcatttccgctgtttcgccaccaattaatgccatctgagcctgctgacacccataagcaattccgcgaacaacggcttcagtgcggtcaacatccaaatgatccaccgccatataatcaaggaaaaaaagtggctgggcgcctgacgccaataaatcgttcgcaaccatggcgactaaatcaatcccaacggtttcatgcgcgtcacattgcaatgccaacagcaacttggtaccaacgccatccgtggcgctgatcaaggttggctccgaaatctccggcaaccgataagctgcggcaaacccgccaacactggctaacacattggcattcgttgtttcttttgccaacgccgcgattcgttgaacagctgcttcgccagcttcaatatccacgccggcgtctttataatcagtcatgcactaacctccgcaacattgactttgagggatgccacttccttatccaaggcaaaggcataatcatctaacggtgctgggtactggccggtgaaataagcgacacacaaaccgccattaggtgccgtggccgataagccgacactctcttccagcccctgggttgaaaggaatccaagcgactcgaccgctaaaagatcccgcatttcagcaacgctatgattcgcagcaaaaagttcgctggtcgtctgaaaatcaatcccgtaaaaacaaggaaagcgcaacggtgggctggcaatacgtaaatggacctcagctgcgccagcctctttcaacaacttcacgatttgtttggaagtcgttccacgaacaatcgaatcatcgactaaaacaattcgcttaccggcaacaactggtttgatcacactgagcttcattttgacgcttttttcccgcaatgcttgtgtcggttggataaaggttcgcgccacatactgacttttcattaaacccatctcataagggattccactggccttcgcgtaaccaatggcagcagacagcgatgaatttggcacgccgacgacaatatccgcttccgccggttgttcttttgctaaccgttcacccatccgtacacgggcctgatggacattaatgccgtgaatatccgaatcggggcgggcaaagtagatgtattccatcgaacaaactgctaattgggtattcgtggtgaaatgatcaatgtgcaaaccagcatcatcaattgtgattaattcccctggctggacatcacggacgaattcagcgccaaccgcgtccaaagccgctgtttcgctgcacacaatatagccgccatctgacaacaccccgacaaccatcggccgaaagccatacggatcaactgcggcatataaaccatgttccgtcagtaagacaaacgcaaaaccaccgtgaacttcatttaaagcggtcttcaactgtgtcagccaaggctggccaacttgccgtcggattaaatgcatcaaaacttccgtatcggaggtggactgaaaaattgcgccttgatcttccaactgccgccgcaaactgatcgcattggtcagattgccattatgcgccaaggcaatggcttcatccgaaaaccggaaaagcaacggctgaatattttccagcacgcgtccccctgctgtcgagtagcgcacgtggcccaaggcggcgcgtccgattaatggcgtcaattgatcggtattcgtgaaaacttcgctcagtaaccccaacccataatgccgccgcatcccgtctttggtcagcccaacaataccggcgccttcttgaccgcggtgctgtagtgtgtgtaacccaagatgcgtgatgctggcggcattaggattaccccaaacaccgaaaaccccgcattcttcatttaagccttttggttcatgtggcatgggagcgcctcctcgaatgctgtctgtagctgttgcaacgatgcagaaaaatgttgattaacggttgtgacttcaaattctggtgcggcctgaactcgaccaatcaattgggccggaccatgcaatgcttcaaatgctgcctgattttcaggggccaccgtgagcaagaagcggccttgcgtctcggaaaatccccaagcagttggcaatgtgacgttaatctgggcgccaagttgggcatcaaaccccatctctgccaaggcgaccaataacccaccatcgcttaaatcgtgcgctgcagtaattagatgctcacgaatggccttcaaaacaaagtgctgatgctgcttttcagcctctaaatcaaaatcgaacagcttgccagtgacttctcctgtttgcagcttctgcagttcgctgccgttaaaatcaccatgagtctcccccaccagataaatcagatcatctgcttgcttgaaagccgccgtggtaatcgtgctcaaatcctcaatcaagccaaccatgccaatcattggggttggatagatcgcctcaccattcgtttcgttatacagcgacacatttcctgaaataactggggcgttaaaggctttggtagccgcaatgattcccttcgccgcctcagccagttcgtagaaggcctcaggcttagttgggtcgccaaaattgagacaatcggtgatcccaagcggttccgccccgctagcaaccaaattgcgcgcagcttcagccacactcattgccgcacccacctgcggatcaagatacaagtaacggcccttactatcggtggtcatcgccagtgctcggtgagtaccgcgaatccgagtcacggctgcatcactgcctggcaagacgacggtattagtttgcacctgcgcatcgtaacgcttgtacaaagatgacttgtcagcaatcgtcggcatcgccatcatgtccgtccatatttgcaccggatcagtgatgatagggtcaaaatccgcagccggttgggccagtcgttttggcattttcccttgttgatgataaatcggcgcatcatcggtcaacgaactcacaggcacatcgcaaaccaatttgccatggtgataaagctgatactgatgaccagcaatcacatgaccaacaatcgccgcatccaaatcataatcagcgaaaacagccaaaacttcttgctcaaagccggcccgaacgcacagcagcatccgttcctgagactcagacaacataatttcaaacggcgtcatttcggtctcacgctgcggaatcaggtcgagatctaacaccatcccgctgttagccttaccagccatctccacgcttgacgataccaatccagctgcacccatatcttgaataccaacaagcgcctcctgatgatgcccggtaatttcgagacaagcatccatcaacagcttttccatgaagggatcgccaacttgaaccgccgagcgatcggctgcttcttcgtcagaaaaatccccagaagcaaagctcgcaccgttaataccatcacgccctgttttggccccgacataaatcaaagcattgccaacaccagcagctttacctttttgaatttgatctttgtccatgatgccaacgcacatggcattgaccagcggatttcgggtatagctcccgtcaaagtttgtttcgccgccaactgtcggaatgccaattgcattgccataaccgccaatccccgcgacgatccgatcaaccaaatgttgggtatgtggctgttcaatgtcgccaaaagctagcgagtccaacatcgcaaccggcttggcaccaattgagaaaatgtcgcggataatgccgcccacacctgttgctgcgccttcataaggttcaactgccgagggatgattatgactttcggctttgaagaccactgctttgccttcgccgatatcaatcacgccagcaccttcacctggccccattaacacgcgctcatttttggtccaaaattggcgtaacaccggcttgctatatttgtaagcgcagtgttcgctccacatcccgctagctaacccgatctcggtatcgtttggctgatggccgattagttctgcaaaacgatcatattcagcctctgtcagcccaaggtctaaataaggtttctgggttgcaatagcctcggggctcatctcaacgtgcaccacgtacatcggctccttccgtttggttaatcagcgattggaatacgcccaagccatccgtaccgcccagcagtgcttcaacagcccgttccggatggggcatcatgcctaacacattaccagtctcattggtcacaccggcaatatcgtgcatgctgccattagggttatttgcataacggaaaaccacttggccattagtttccagagccgccaacgtttccggatctgcgtaataattgccttcaccatgagcaatcggtaatgtcaaatgttcaccaacttggtattgatttgaaaacgccgtcccggcattttctaccgtcaatgcaactggttcacagatgaagttcaagtcgcgattccattgcaaggcgccgggaagcaaaccggcttcggtcaaaatctggaaaccgttgcaaatgccaatgacatagccgccagccgcagcaaactgctttagggcagccatcactggtgaaaagcgtgcaatcgcaccactgcgtaagtaatcaccataggaaaaaccgcctggcaccatcacaacatcataagcagtcaagtcggtttgagttggcttgatcaagtcacactcggctccagcaatggcacgcaccgcccattgcaaatcaagatcacagttcgagcccggaaaagaaatcacagccgctttcatgcgttaacctccgccatcggttctagctcaaagcgataagtttccatgttgacattagccagtaattggtcgcagatcgtatcgacttgcttgcgaacttccgcttcgctgcctgctaacgttaattcaaagtacttgccatacaatacatcttcaacattgtgataagccattcgtcccaaagcagttttaatgacctcggctttgggatccagcacggaaggtttgtaggttacgtaaattttagctttaaacatgagcagctcctttttcttgcaggcgtgaaaggacttcttcataaaccggggtcaatggtccacggttttgtcggaaaacatctttatcgagcgatgccccggtttgttgatcaactaagcgaaaattatccggagacaattcatcagccagtaccaaggtgccatccttgagcgtgccgtattcgagtttgaaatcaactaaggtgatcccaatcgccgcaaaccgttgcgtcaaataagtattgatgcgatcagttaaagcgtgcacttgcttgagttgttcaggcgtagcttcgtgcaaggcgaaaatttgggcttcattcatgaacgggtcgccaagttcatcagacttgtaatagtattcgtggattggcgggtcgagcttcatcatcggcttaacattgaacttggtgacaaaatgaccggatgcataattacgcacaactacttcaagcggcaacatcgcggcttttttgacgatcatcgtcgtgctgtccggcgaatcaagataatgcgttggtataccggcagctgtcaattccttaaatagcaacgtcgaaatcgctcgatttaattcgcctttgtgggcaatctgggcttttttctcgccatttaatgctgtggcttgattggtgtatgccatccacaacacatcaggatcatcggttgcataaacctgttttgccttgccggtatacaataatgttgttttgttcaccatgctgcctccatttgtttaagtatgtccaacacattacgatcatcagttaccgtaagatgacccattttgcgaccggagcgaatctcggctttaccataatcatgcatgtgccattcaggatgctgaggccatttctgcttggcaatggttaaatcgtcgccgagcaggttgcgcataaccgctggctgcttcaatgtaatcggcggtatcggtaagccacaaatactcaaaatatgtgcatcgaattgtgaaaagttgcatgcctcaatcgagtagtgtccggaattgtgcggacgcggagccaactcattggccaccacattgtccccttcgataaagagctcaacgcccaacacaccacgaagatccaggccaagcgcaattttagtcgcgagatcatcaatctttttggctaacaccggcgaaatgttcggtgcaggcgcaagcgtgagatgcaaaacatggtgctgatggcgattctcaacgatcggaaaaacacgcacttgatcgcggccatcacgtgtcatcataacggagacttcacgatcaaattgctgccgtttttcgagaatgcaaggaccatgcgtcaaaagttcgcgggcggcgggaaaatcatctggtgtattgatatcttgctgaccatggccatcataaccgccagtggtcgtcttcaggatgcttggcaagccgatggtcgcgactgcttgtgccaactcagcggcacggttgacagcggcaaaaggcgtcaccggtaccccatgtgtctttaaaaaagtcttttctttgatccgatcgcgggttatcgccaaaatggcggtgccttgaggaatccgcgtctcgctgcgaaccgcctccaacgcggctaagtcaacgttttcaaactcatacgtcagcacatctgacgcatcagccagttgctttaaggcggcttgatcgttatagggcgcagtgatttgaaaatccgctacctgaccggctggcgaattgggtgtcggctctaaaataccgacgcgataacccatcgacttggcgctttgtgtcagcatgcgtcccaactgaccgccgccaatgatgccaattgttgctggggacgtcactacatcaatcattgaagcgcggcctcgctttctttggcacgcttagtttgagcatcgcgaaaagcttgcagtcggtcagccagttctgaatcgttcagcgctaaaatagcggcagcgaacaacgccgcattgacagctccggcatcaccgatggccatcgtgccaaccgggaccccgccaggcatttgcacgattgacaggagactatcaaccccatttaatgttcgtgttttgatgggaaccccgataactggcagcaatgtattagcggcgagcattccaggtaaatgagcagcgccgcctgcaccggcgataattgcaccaaaccccagtgccactgcctgtttaccaaaatccgccagctcgtctggcatccgatgagccgaaataacccgcttctcataaggaatagccaatgacgttaactgagccgtcacttgctgcatggtcggccaatcagaggttgaccccatgaccactgctactttttgcatctcgttccccgctttctttaagatgttttgagaatagcacgtcagcgcgacagattcaataaaaatgagaacaattctcaatgttatattaataatcgttcgtgtttatattttaaaatcttaacccgtcagcttttcaatgtctgaaatcacatctgtgttgctaatattccttttgacaacttattgcagtcgccatcgccaaagactgccgcccgcgcacaaaaaaacgcacatcacagagcgatgtgcgttcatcagatatgcgttgttgaagtcttaaacttaggcagccttcgttgaaaatgatttgccgtccttagcaacaaagagttgcggggcaacggttagcaatacaccaacaacaacaattgttaagacggtgctgaataacgctgatccaccattgacgatcaacgagtatacccagacattcgttcctttaggcgcatacgcaccccagaaaacaacgccagcgatgaaatggataaagtatttagcaaacgtgccgataataataccagcaaaggcatagccgctcgccttcactttttcactaccgcgcactgccttttggaaagatgcaaacgtcaaccccattaaaccgaccaaggtaaacgcaatcggatattcaagaataccttgtaaaggattcaagacactgccaccgccaataccacgcaaaatcagatccaaaatcccccagacaaagcctgcccatgctgcaggaactaacccacgccgcatagccaaaacagcaattggaatcagaccataattcagttcaattgccgaaacacccgtggtatgtggaatataagttaatgccatcgcaaaagctgcaatgatcgcagtttccaaaatgacaacaagttgcttgtgctgttgcataaaaaaagcctcctagtgagtccccgttcacaaagaaggtcgcttccgaccattcacaaatccctacgctcgcattaacgaacaggttcgaagggtccgggtttccccgttctcagccaatggctcccctttgtgaaggttcatcgaattgttgatacacctttatggtatcaaactttttgtaaagcgcaactttttggtcttgaacaaatcgcttgtcattaatgatttaagcgggctttctcctctcggtgcaaagtttcgagggagcgtccagccgtttccggcacaaaaatcagaacgaacagcaatgaaatcaaatttgtcccgatgaagcaaacgaatgtccagaacatgcctatttgggccagaccaaccgggaacagaacgccaacaccaaagttagctaaccacaagcagaaagttgcagcgcccatccctataccccgaacctgttcagggaagatttcagacatcagcagccaagtcattggactgatagcgccttggaagaacgccaagaacagcatcatcatcccgattgtcgcaaatgcccggaatgacgaacccgctggtagtcgactagcgaaggtgacaccagtaatcgccacggttgagccaatcaatcccacaatcagcattggccgccgcggaacatgcttcaacaattgcaacgtcacaatcgttgcagcaacggcagtaaccccattggcaatgttggcgatcaaggcactatctcgcccaaaacccgtcatttgtaaaattgaggtgccataatacatcatgacattgataccagcaatttgctgaatgacgcctaggccgatgccaatcagaaccagtcggcgaatccatttggttttcaatgctcgaacactcgcctgcttatgtttagtatcttcggcaagattctgtttcaaatggtcaatctctgctggcacttcagcagcagatcgcaacacttccaaacttgaccgtgctgctgccggccgtcctttcatcattaaccaacgaggagattccggaacaaaataagtcccgatacctaagataattgccggaatgactgccaatacaatcatccagcgccagataccaggaacgttaccaaaagtagttcctaaaaaggcattgagaacaaaagcaagtaactggccagtcacgaccatcagctcattttgtgtgactaaccgcccacgatgactcgttggggcaatctctgctaaaaagctcggaaccagcacagagacgccaccaacggctaatccaaggatcagtcgtgcgccaatcagccagccagcactcggggaaagtgacgaggctaccgttgccagaaaaaataagcccgctaacatggtgatgagccgcctgcgcccatagcgatcacttaaacgaccgactaagatggcaccaaaagcagcacccagcgtcaaactactggtgacccaaccctgtgatccaggggcaagtttcagttccgaagaaataaaaggcaatgcgccattgatcaccccagtgtcatagccaaaaagcaggccacccatcgttgaaatcaaagctactagccgcaaccgtgtcttcgcactcgcaaggtgaccggtaaatcgatgattgtgtgtttttgattgatacatgcaattccccctacaagtccaaatgaaccaccgctcacagtgtcataccatgaatcagtaactcaatttttagtttacataataaccttaacacttttctgaaaagtctgcagtcagtcactgttcagatgccgacgaatagtcgcgcaatcacctttttgcatggcaaagataaagtcccattttcgagcgggtttcagaaaaatcaatgctagcgagcccgatcaaaatcaaattttggtcaaaaaaagaagccgtcaacttattcagtcaatagcctctttctgataatgaaagtttatttctgaccagttgttttcttaaccagatcagcgttttcatcattagtgatattttggttcagagcaatttcgtccatcttagccatatcagctgtcgaaagcttcttcatcaagctgcgtactttaaggacagaagttgcggacattgagtattcgtcaagacccataccaagcaacagtggtaccatgattggatcaccagcagcttcgccacacataccggcccacttgccttccttatgtgccgaatcaatcacatgcttgattaggcgaaggatggatgggttgtatggctgatacaggtaggaaacatgctcgttcccacgatcagcggccatagagtactggatcaagtcatttgtaccaatggagaagaagtcaacatacttagcaaactgatcagccaaaactgcagctgcaggaatttcgatcataatgccaagttggatatcatcagatactttgacgccatccttgactaacttatctttttcttcagtgaaaatctgctttgcttgcttgaattcagcaatggtagcaatcatagggaacatgatccgcagattgccaaaggcagatgcacgcaacaaggcgcgcaactgtgtccggaagatatcttggcgatcaagactgatccgaatcgcacgataacccaagaatgggttctgttcttcaggaagcggcaaatatggcagatgtttatccccaccaatatccatcgtccgaacaacaacaggcttcggactcatcgtttcgacaaccttcttgtaggcctcgaattgatcgtcttcagttggtaattcagcagaatccatgtacaagaactctgtccgatacaaaccgataccttcagcaccgtttgccagcacaccatcaagatcctttggcgtgccaatgttggcagcaacatcaaagtgtttgccatcagctgtgattgatttggccgtcttcaaaagagcccattcagctttttgcttagcaaatgcttcagcatcctgcttgaacttagctacttcatcatcggtcggatcaacaacaacttcaccagttaagccatcaacggaaataagatcaccgttattagccttcttggtaatgtcatctgtcccaacaacagccggaatttccaacgaacgtgccataatcgcactgtgcgcagtccgaccgccaatatccgtgacaaatgctttgacatacttcttattcaattgtgcggtatccgaaggggtcaggtcatgcgcaaccacaacgacttcttcatcaattaatgctggatttggcaaattgcgaccgagcaagtgtgccatgatccgctttgtcacgtcgcggacatcagccgcacgttcctgcatatatggattgtcggtcataccttcgaatgtcttaataaagaattcggagacttctttcaaagcctgctcagcattgactttttcatccttgatcttagtctctacctgaccagtaaagtcaggatcagccaaaatcatcatgtgcgcatcaaaaacctgagcctcttcttcgccaagcgattcagcggcctttgctcgaataacctttaactcatcattactttgatcaagtgactgcttcaggcgatcgatttcctttgaaggatcatcaaccgtctttttttggaatgacaaatcaggttgaaccagtaaataggccttcgctgtggcgatcccatcactagcagcgattcccttcaaatgttcagccattattcagccaagccttcctttttcattgtgtctgtaatagcagcgatagcatcagcctcgtctgcaccttcagcagaaatggtaacatcggcaccttggccaacacccaaactcatgacgcccatgatagacttcaagttaacgctcttacccttgtattccaagttgatatctgagttgaacttgcttgctgcctgtaccaacaaggttgccggacgtgcgtggatcccggtttctgcaataatattaaattcgcgtttttccatgactgatctgctccttcgtattaactagatttctagtttttttccgaatagtttgtgtgcgcattcgtacccaaaacaattcatgtaaaccttaccattttttgaagcttgtcacaagcgccacatcagatttggcgcctatattaacgagaatcaactgatcgataatggtattcaatgacaccatcacgtttagccattcccacgatctcttcacgatcaggataattcgtccatgccgcgcgaaacgccatgaacgtttctggcgtcaccgtgattttgtcccgctgaccagtctttaactcatctattaaagcgacgtaatcctgagtcatctatttgcctcacctcacctaataagagtagcataaaagctggtaaggaaaaagcgcaagtgcttgctgtcactgaaatttttgcaactttttagcactcttagtggcagagtgcttgcattccagaaatgtgggtgtatactattgccataggtcaagaaaggtcaaaccttttttgactgcacgtggcacctaaacagataggaaggttgtgacaaaatgctgtgtgaaaactgtcataagaatccagccactattcatctttcaaccgttgttaatggcactcgacaggaaattaatctctgccaaaactgttatcaattactcaagaaccaagcaggaggaaatatgagaccaactgatgcaaccgatccatttggtttcggcagcttagatgatattttccgtgcgatgaatcagggaatggatcaaccgcaacaaccaaatgctcagaccccgccaactcaggcaggccgtggcggcaatggtaataacggccgcaatggcaaccgtggcaagggactgctgggacaattcggcgttgatctgactgaacaagcacggaatggtcaaattgatccggtcattggtcgtgacaaagaaatttcacgggtgatcgagatcttaaaccgccgaacaaaaaataatccagtcctgattggtgaagccggtgtcggcaagactgctgttgttgagggcttggcattgaagatcgctaatggcgatgttccgtcaaaacttcaagatcggcatgtcatccgactcgatgtcgtttcactagttcaaggaactggcattcgcggtcaattcgaacaacgtatgcaacaattgattgacgaacttaaaaagaataagaacattatcttatttattgatgaaatccatgaaatcgtcggcgctggcaatgctgaaggcggtatggatgccggcaatgttctgaagccagcattagcacgtggcgagttgcagctcgttggtgccactactagcaatgaatatcgtcaaattgaaaaagattcagcccttgctcgtcgtctgcaaccagtcctcgttgaggagccaactgtagaagagacgattaagattctaaaaggcctgcagccgcggtatcaagattttcatcatgttaaatatacagatgccgccattgaagcagctgcaactttgagcaatcgttacattcaagatcgtttcttgcctgacaaagcgattgaccttctggatgaatcaggttcccggaagaatctgaccattgccactgtcgatccagaaacgatcaagaccaagattgacgacgccgagaagcaaaagcaagctgctctgaagcaggaggattacgaaaaagctgccttctatcgtgaccaagttactaagttagaagatatggctaagaaacagtctaatctgcctgaaaatgaaattccgactgtcaccgaaaaagatatggaacagattgttgaagaaaaaaccaacattccagttggtgaactgaaggcgcaggagcaagcacagctgaagaatctggctggtgaccttgaaaagcatgtcattggtcagaatgaagcagttgataaagttgctcgcgctattcgtcgtaaccggatcggctttaacaagtccggtcggccgattgggtccttcctattcgtcggcccaacaggtgtcggcaaaactgaactggctaaacagcttgccaaagagctgtttggttctgaagacgccatgatccggtttgatatgtcggagtacatggagaaattcagtgtctccaagcttatcgggtcaccgccaggctatgtcggctatgaggaagccggtcaattaactgaaaaagttcgccgaaatccttatagcctcatcttgttagatgaaattgaaaaagcccatccagatgtgatgaatatgttcttgcagatcttggatgacggccgattgactgattctcaaggccgtaccgtttccttcaaggacacgatcattatcatgacatccaatgctggctcaaccgatgccgaagcaaacgttggttttggcgcagctttaagcggtaagacgcacagtgtgctggatcagcttggtaattacttcaagcctgaattcctgaaccgttttgatgacatcgttgaattcaagtcattgtctaaagacgacttgttgaagattgtgtcactgataattcaagataccaacaataacatcaaggatcagggcttgacgattcatgttaccgatccggttaaggaaaagctggttaatctcggttacaatcctgccatgggagctcggccgctgcgtcgagtcattcaggaacagattgaagaccgcgttgctgacttctaccttgaccatccaaaggctaaggaacttgaagcccgcatcagtaatggtgagattacggttggtgaacctgccaaggctgaaaccactcaaaaatctaaaaagtaatttgttttaagaaagccctcgaacttcattgcgttcgagggctttcaattcacatattattattttccgttaaactgttttataataaaaacagtagggagagaaatggagggcatgagcatgcgactgattaacgtgaccaacagtttcagaaatctagtaagccaacaattgagtggtaccgatgcccggctggtcaaggtcttctcacttggccaaacgacagttgtttatacggaggcaccttcccatatcgaacttcttttcaccaatgagcgccgcaatattcagcgtgcggaaattgctttcacactcgaacggcttttgcaaaaggacattggcgatgtttcgccgattatgggtcatcatctggcagaagtgactgttcccaagcttgagcggcaagcagagtaacccgaagaaggatagtgccatgcttgccaataccaatgagatttttgcacattgctagattaataagcgcacacaaaaagcgactgacattgctcagccgctttttgtgtgccacgatactcatacccaagcaccctattacattttggcagttaatttaacgtcaggatacttgtctgcaaaccagcgttcagcgtattgattctcaaataggaacaacgggtcgccgtggatatcctgaaccaataagttccgggaactgctcatcttttcatccaattgatctggattgatccagcgagccgttcgcgagccaatcggggtcataatcacttctgaatgatattcatgcagcatccggaattggaaaacttcaaattgaagttgcccgactgctcctagaatataatcattcgtgttataggtcttgtaaagctggactgccccttcctggacaagctgctgcatccccttatgaaatgatttttgcttcatcacattcttcggcgtaacgcgaacaaataattcaggggtgaactgcggtaatttttcaaattgaatcggttccttgccttgataaatggtatcgccaatttgaaaattaccggtatcatacaacccaacaatatcaccggcaaccgcagttgaaaccgtttcacgggtgtcagccataaattcggttgagttattcagtcgcatcgttttgccggttcgatgaaggatgacatccatcccccgttcaaattcacctgaaacaattcggacaaaagcgatgcgatcgcgatgagcagggttcatgtttgcctgaatcttaaagacaaatgcggaaagctctgggttagtcggattcacttccccgccttgttctgttttcttcggtcccggttcgggtgcatattgaacgaagctattcaaaaatgtctcaacgccaaagttagtcaacgccgacccgaagaacactggtgtttgctcaccagccatgatctttttcaaattaaactggttgcccgcgtcattcaataattcgatatcatctaatgtttgcgtataaatcgaatcctgcgtcaatggttgacttggatcaagctgaccttggtcattcaacggcaaaaatcgatcatcaccttcacgccgataaagctcgattcgctgattcactcgatcgtagagacccttgagtcccttacccataccaatcggccagttcatcgcatagccttcgatacccagcaagtcttcaagttcagcaatcaaatccaatggttcgcgaccatcacgatccaacttattcatgaatgtaaaaatcgggataccacgttgtttgacaactttgaacagtttcttggtctgagcttcaatcccctttgccgagtcgatgaccatgactgcggcatcaaccgccatcaaggtccgataggtatcttcagaaaaatcttcatgcccaggggtgtccagaatattaatgcgtttgccctgataattgaattgcatcacagagctggtaaccgaaataccacgtttcttttcgatttccatccagtccgatttcgcaaaatgtccggattttcggcctttaactgttccagcctcgcggatcacgccgccaaacaataaaagctgttccgtaatcgttgttttcccagcatctggatgtgaaataatcgcaaatgtgcggcgttttgcgacttcttttgctagttcctgtggtttcatcgtgctttccttccaaaattgacaaaatttgctaacaacgttgcctatttacacagactgcatcgctagctatcggcctcgtgggaggcttcttctggttctgatgatagatgaacatgaacattgacgagtcgtgacccttcaactttgccggtcgccaataacacacctggtgccagctgcattttttcgctgtgatgcgatgaaggaatggcaccgagttgcgtcagaacataacccgcaatcgtgtcaacatccggtgcatccaaatcagttttaaacaaatcattgaagtccgaaatcggcatccgccctgagacaacgaaatcatggtccccttgtttcgtgaacaatttttcaacctgatccgattcgtcatcaatttcaccgacgatttcctcaagcaagtcttcaatggtcacgatgccgacaacgccaccatattcatccaataagatcgccatttgttgttgcttcacttgcatttcagtcaacaaatcatcgactgtaatggtttcgggaacaaaaaccggcgcggtcatgaccgattcgattttaacatgatcaaagccgacgcggcgtgcttcctttagcagattcttgatgtgaacaatgccaaccacgtgatctttgtcttcttcataaaccggaattcgtgaatagatattgttcaaaatcgcgtcaatcgccgtgtgatcaggttcttgcgcatcaaccataaaagcatccgttcgcggcaccatgacctcgcgcgccatcgtatcggacaacgatataattccctcaaacatttgatactcatcgggatcaatcgccccagaatttcgaccactttcgatcatggaaaccatttcgtcacgggtcacggtttccccttcatgattgaattccatcggcgtcagtttcattaacaacttggttgaagcagaaagcagccaaacaaacggacgcatcactttggctagccaactgatcggggtcacactcattttagcaacccgctctgtcatttgtaacgctacctgtttgggatataattcgccaaaaaccaacgaaaaataagacaagatcagcgtgactaagatgaccgctgcctcatgcgcaaatgaccagccgccaaaaattggtgcaacccgatctgccagcgttgttgcggccgaagcagacgcaaagaaaccggcaaaagtgatcccgacttggattgttgccagaaaattactcgaatccttcatgatggtcacaagcttggcggccttacgatcgcctttatccgcctgcgccttcatacgagtacgggaacttgaaaccacggcaatctccgccgcggcaaatcctgcattgattaaggtcaaaatcacaatgaggatcaattgtccccatatctgaccgtctgggtcactgcccatgcaaaaacacaacctttcgtaaaaaaaacggggaatcatccccgcttcgttcgattatttcagtataccaagtctttatttatttttcaattgtggatcggcttgatccttgatctgatgagcttctccagcattttcctcatcactgtcagcatcctcgtcatgcttatgttcctgatggaaacgataaagctcgtataagtatgtcacaactgttttgatgacagcatatgtcggtacagctagaatggtgcctaacaatccccatagattgcctgcaaccatcagcaaaataatgatggttaaaggatgaatgtccagtgagcggccgatcacattcggataaataaaattaccatccgtcatctggataatgacgacaacgacaacaacgagtagcatctttgtccatccctcagtggcagcaattgccaaagctggtgcaataccaatatagggtcccaaatacggaataatggtaacgatccccgcaataaagcctaagagatacgcatacggcatgccaataatcagataaccaataaaagtaaaagtgccaacgaataaacattcaatggcctgcccgccaatatagtgagacagtgtcgagtttaaacgcgtaaaaacagttgcaacctcttcgtgataccgatgaggcaacatcttttgaatacttggcacaaagttttcaccgtctttgagaaagtaaaatagcatcaccgggattgtaatgatactgatcatcatgctggctactgatccgataaccgttggcaagccggtggaaaaaccgcccagaactttgctcaacaccttgcttggcgaaatttgaagactggcaacatatttgccaatatttagccgctgataccaagtatagtgtgacgccttactaatgaataaccggacgccttttaagaaatccggaatattcgtaacaaactgagtgacctgatagatcaagtttggcagtacggccatgaataccagaaccaaggcaccgatgaccaccaagaaaatcaataaaatcgaaatattgcgactgatgtggaacttctgcaataatttaacaatcggattgaagagatagaacaaaaacccagcagataaaatcggaatgagtagcgttgagaaaaaagtcgccacaggtgcaaacaagaacgaaacctgtgtcaacccgatgaccacaaaaatcaaaatcagaatttcaacggaccaaaacattaattttgaatgccgtaacctatcaaacatattcgacctccccagcagcattttactagtgctataatagcaaacaatttattaaaacggaaagaaggttcaacttttggaagtcaaaacgacaacaaccctcgattcacagattcatcaagacagcgtccagattcgcacccacgttttcgtggaagagcaacatgtgccaccagagctcgaagtcgacgccgatgaagcaaaggcgacctattttgtcatttgcgatgcaggtgtgcctgttgctacggcgcgcattctgcctgagggcgacgcctaccacgttcagcgtgttgcagtcgaaaaagcctatcgcaagcatggccttggtaagatggtgtttgaagcaatcatgacttatgcccgcgcccagcaaattcaagcgctacgcttaggtgcgcaagttcaggcgattggcttttacaaagccctcggttttcaattgaccgatcgccctgaatttcttgatgccggcatccgccaccgtgaaatgatactcaagctggcttgacgatcattcaaatttatcagcttcacttgattaaaccatgagtatgtgagaaaaatgcgatcccaacacgaagatatcgggatcgcatcaattcaacaagcaggctaatcccctgcttgtttttatttttcatgcaccttactcatactcatccacaccttttaactgatgaggatcaatatatagacgataagccacttgatgaaccgcgccatcttgaatcagatagctttcaagataataaggatgatctgtttgcccgagtctttctggcaaaggataccctgccttttcaatgatttgcagacccttattaaagcttgttgcaagtggtaattgtttcaacagcacacttgtagctggctgcctgacctgaccagccgttgcttcaggtaggcgaaacgcttcataaggtttgggaaccgctgcatcagccggtaacaagctgccgatccaatataaaaaggtgtcatatggcgaaaagacaaccatcgccgatcgattgggtatctcggctaaatcatcgagcgttttaaacccaagttgcgcctcaaagtcttgccacgctggttgaaatgtaccaagctgatcactgttttcgacggtataggcatgacccgcaaaaagttgagcaggttgttttggaatttgtttcatttttgcctccaagtttgaccggttgggctagatccggtgcgctaactgaatgtaacgacggtaccataaatcgacataggcttgtgaaaagggtcctttgccgtggttgatccaatcgacaagcaccttcacattagtttttaaaatccgatcagtggttgcaggatactgccaaagtttgcgatgggcctcgtattcatccacatccagcaaccgtttttcaccatcggcaaacaccttgacgtctaagtcatagtcaatatattttaaagcttcttgatccatcgtgtacggagtggccagattgcagtaatacgacacgccgccttcacggatcatcgcaatcacattgaaccagtaatgcttatgaaagaaaatgatcgccggttcccgcgtcagccaacggcgtccgtccgactccgtcaccaaggtgtgatcattgcacccgatcagggcatcttcactggttttcaagaccatcgtgtcacgccaggtgcgatgcagactaccgtcatgtttataactttgaatagcgaacgagtcgccttctttagggatccgcatacaaaacccgctttcttggaaatttcgttcttcattatagcagagcatggacaggcgcgcttagaaactagcaagcgtgtgaaacagcccgataaaaatccggtgtataagccagcctcatgtgtgatagccagactttgttcatttgtgcctgaggttgacttattgcagcagtgaacgcttttcagcaagagtcggcagcttacaagggcatgcaaaaggatagcttgatcttccaaaaaaccacgatcaactttccgccaagtcgtttagcacttcatcaatagcttccacatcaaagcctttacgaaacaaagttgttttaactttttgtttgcgctcccgatcaccatatttcgcttttagacgccattgtttggctgcctccagcttaagcaagtcgctttctgcctcaggatcgggttgcgggtcgatggttgcgatagctgtttggatagtagtgtcatcgaatcccttttgcattaaagcgactctgagacgttgcagttggtctttataagcgcgatgctggtggtgccgaagattcttctgaccagcgcgaacagccgcatctagccatgctgttgttggaatagcagctaactcattggccaacaagtctggcttgaggcctttttgttgtagcttatgttgcagcgttcgcggcccaagttcacccattttcagatgctcttcaatgtaacgatgcgcataatctgcatcatccaaaaagcccagatcggtcagacgcgtcagcaccttttgaatcacatcagccggtaagtcttctttagctaaccgatcactgacctctttgctcgtgcgactttggtggctaatgtaggtcagcccgatctctagtcccatcgcggtgacttcacttctcttgatttgggcaatggtctctgctgtcaataccattcctttggccaagcggtaatccaccagcgtggtttcactcaccggaaatgcgtaagtcccgtcaataaaaatattatagcgcccacgccttttttgggcggttatctttgtaatttcactcatgaacccctgtcacctctctaatcacgttgccattctatgttatactttttataaataaatttggaggctcgttatgtttgaagccagtttctttgaccggcacagcttaattaattatcaactattccgggcaatgaagaccctacaacagacgacaatgtcgatcaatacgcttagccgcaatactgggctttcgtattcgcagacttatacggcatttcagaccgttttagcacagctcaaccaaatcttacctgacaaaaagattgacgaatcaagcttcgcagcagttttgcctgatgtttcgattgatcgttatcggttctcgctattaaaaaacagtctaccatttgaatttttcgatggggttttcaagaatccgcattcggactttcacgccttcaagcagcaccatcaaacaagtatttcaacgttacggcgccgaatttcgccgtttcgagactacttagctgacaatggtgtcacgctaaatagtactacttgggccattgaaggcgatgaattgcatatacgcttagccatgttcaccttctttacattagcctatcgcggggcaggatggccattttcaagtgcagaagagcgggaaccaaaagcacttctcaaggtaatcaaccaaacaaaacaggctttcttggtgtcaccaatccaaccaatgtccaaagaagctttactgattctcgccattcagatgttacgaatcaactgtgggcacgcccttttaccaaatcggcgaatgcagctgttgtttgacggtgaaactgaattgccagatttgatttttacgccagactactttcccaatttatctgcttctgaattaaaagcagaaaaacagtattactatttttcgcgtatgtattttatgaccgtcactcggcaaccacatcaaattgattatcagatcatgacccattttcaaagtaaagataacttagtgaatcgatttgtgcgacatctggtcacttctttgaataaccaattaaaagaaaccaaaagtcagttaattgccgaaaatcaagtcatgatagccaatctttaccgattaagtttcaccgagtatgtgctgaatggtcattttagtcagaggcttgattttgcttcgacattgcatgacgaagcacgaacaagccaattgacggccaaaattcgcgactgtttgaaacgaattcccaaaatggcgcctgagtcaatctacgcagactttacaagccaatttattaatggtctctatatattagtcaatgataattatcctgaactcaatcgtgacatgcaaatggtcgttaacgttttgattgaacatgattctttcgtcaaacgggatctcttaaactttttaaacgatttaggctttattcgcgttgtgcctccaaccgaggcgatcaatcctgatttgatcattacaacgctgacaaagccaaaacgggtgatcccttgcatgggccacccgtttgatccaactgttcccttgatcacttggtccaaggaacccagcgatcaagactattttcacctttttcaacgcttaaaacgcctacagcgcgagcaacgaacagcagccgatacgaatcagactcgtcagtgaatcggttttgccgtgtagccgacaaagtagactagggcttcatacccggcaagtcccaaaatgaccgctgcaattagaatcgtttgactgaagttgcgattaaaccaaagaaagactaccatcgcaaacatcacaacaaaataggcattttgtaggctgcgattgatttgaatttcaaattgggcatccggactttgatagtcaatcgtgtggatcgcattaaaccgaccaactttataagtaatcttatcgccgcgttgcacctttaagtctagcgtctcgccaactcgtatcgtatgcggcgtgtcattttgccacaccgttgctgtcatttttctactcatcgtattcgaataattgattttcacattaaatcctcccgatgattcattatactaaacattcttaagcctcgtcaccatttctcaaagcaaggagcatttcatggcagtcactgtcaaaatcggtcagcgttttcccctgaccatcaagcgtctagacattaatggcgcaggtatcggttattatcaacggaaaattacgtttgttaccggtgcactacctcaagaggtcgtcgtcgcagaggttactgggattcacgaccgttatcttgaggccaaagttcataaaattcggacggcgtcaccaaatcgcgtaaccccggcagaaccgctatttggacaaatcggcggggtcgaactcaatcatctcgcttatccggcgcaattgcgatttaagcgagatgtcgtcgcacaatcgcttgccaaatttaaaccgactggctggacccattatgatttgcggccgacgattggcatggcacaaccaacgcactatcgaaacaaggcccaatttcctgttcgggtcattgatggtcacgtacgcgcaggtctttatgctccaaactcacatcatctcatccctttaaccaagtttctgacccaagcaccgctgacaatgaaagtcgtgacaaccttgtgtcagattctcgaacagcttcagatcccgatctataacgagaaaaagcgctccggaattgtcaaaacattggttgttcgcgaatcatttgcaacgaaagaagtccaggtcacgttcatcacgaacagtccaaaattaccgcacgaaggcgaattgctcaatggcatcgccactcagcttcccatggtggtcagcatcgcccagaatatcaatcctggcgaaacatccttaatttggggcaaagaaagtcgcctgctggcaggtctcccttatatccaagaaacactgttaggccggacttttcaactctcaccacaagcatttctccaactgaacccaaaacaaacagagacactttatacattggccgcaaaagcacttgatttagggccgcacgacaccttaattgatgcgtactgtgggatcggaacagtcggcatcagtttagcaaaaggcaatcaacctatttacggaatggacaccattgcggaaggcattgccgatgccaaggcaaatgctaaagcaaatggcctcaccaatgcccattattcagtgggcaaggctgaagacatttttccaaaatgggttcaggaaggcatgaaaccagacgcggtcatcgttgacccgccacgagctggactagagcgtgccttcatcgacgccctccttgaactcgatccacccaaatttgtctacatttcctgcaacccttccaccttggcccgtgatctcgttttcctcactaaacgctacaaagtcgactggattcaaagcatcgacatgtttccacaaacagcacgatgcgaagcagtggtaaaatttacaagagcgtgaacagctgcgtttaggaaccgtaacataagcggcctcaagccgtaaccagccaaagcccggctggttacggcttgaggtccttatgtggaggtttctgcggctgtgaacgcgtttcaaaaagagcgtgaacagccgcgtttagaagccgagccatatacggccgtttagtttcaaggtctgtatgtgtcagattttgcgactgtgaacgcgtttcatcaggccaccacttcacggcaccccacctaaaccaacaatcccgcaaactacagacgaggtcttaaaaaatgaaaatttactttgctaacgccttgttcagtcatgctgattttaattacaatgcgcaactcgctgcccaaattcgccgcgccttaccagatgttgacatgtatgtgcctcaagaaaatgccgcgatcaacaacaaagaggcatacgccgattcgaaaatgattgccgaagccgacaccaagcggctgctgtcagctgatttgatgattgccattctcgatggccccgtgatcgataacggggtcgctagtgaaatcggcgttgcctatgctgctaagattcctattttgggtctttacacggacagtcgacggttaggcgccgccaatcaacaaaaactcggtgctttgcaacaagttgcagaaaaccagtttcactatctcaatctgtataccactggtttaattaaacttaacggcgccattttaactgatgaggatagcttgatcgccagtatcaaatcccgtgcttaaatccgattctagtgacatgtaaaaaagcttgctaatatgttagcaggcttttttacatgtcactatcagccgaattaagaaaattaatgcattttcttaagcataaaaaatttggttttacgaaagtcataaaagattttcgaaaacgcaaataattttccagaacttagatacgaatcgtcacgaacaactaaacttggacttccgtctgcaatcccaaagaatttggctggtaagccagaaatcatttcacactcaattacagagtcaatgaatccaactttcagaccaggcttttgatcaataaaagcaaatagggacccctttaatgcactattcggaatgttgtccacaatcgatcttaaataatacgagtgttctactaagaacggttgaccgtctagtgttcgttgccgggtcaccgaaattaatgtcgtctcattcggcaatttctggctttcaggcaaaaaatctgcctgatctagcgtaatgacttgttgatgaattgccgttgttttaacaactcgtccctgtctcgccatttcttccgtcaacccaacgttattttgaagcgatatggccccctcaacgtggtgtgggcgagcaaaagtgccgctaccatgtgcctgataaatgtagcccaaattggcaagatcttttaaggcttgtcgtaacgtgtaacgagtgacttgatattgacgcatcaattccggctcagcaggtagttgaccatcttcatcttgaatagcaccttgttgaatcgccttgattaattgattctcgagtgttttaatatcatagctactttcccgctgagacaatttatttccgcctttcaactttgcttccaagctcagtcatttcatgttattataccgccatttactgttccggactagctccacgtctccagtaaaaaaaacgcccttcgaaaggcgtttttttgactacatgcattttcatgctaggcgagatcatccccgttactacgaatcactttttgaaaccaatcaaaagaggcttttttgcttcgtgcaagtgtgcctttaccttgatcatctttatcaacataaatcacgccataacgtttttccatttgaccggttcccgccgaaaccaaatcaataatgccccacggtgtataacccatcagcttgacaccatcgacctcaaccgcaagtcgcatctgattaatatgttgacgtaaataatcgattcgatagtcgtcttgaatatggccatcctgattgatcttatcaaatgccccaaaaccgttttcgacaataaataagggtacctcatatcgatcactaaaccagttgagtgcataacgcaacccgactggatcaatctcccaaccccagtctgaacgttgaagcgtcgaattcttaacctctcgattgtgtcccatggtaataaagtctgtaggttcatcttgtgaggcttcagtgacatgggaagcatagtaagaaaatccaatataatcgactttcccagctaataaaacatcacgatcttcaagtgtgatgtccaagttaaacgcatgtcgatcaaaataacgatccaaaaatgcaggatacttgccctttacttggacatctgccagataataattagtctgcatcgttcgctcagctttaaacacatcatttggattcggtgttgcgggataaacaggacccatcgcaaccatacagccaatttgaaaatcggggttaatccgatgcccaatttggactgccaaggcacttgcaacggcctcataatgagcggcttgaaacatgactgcttctttatcttcatcaggcttgatcagtagcccagaattggtgaacagagaccattcattcatcatgccaacctgattattgatttcgttaaaagtcatccaatatttaactttgtctttgtaccgatcaaacacaacagtcgcaaatttgacgaagaaatcaatcaccttacgactacgccaaccaccatattttttgacaaggtgataaggcatttcaaaatgtgacaaggtaatcactggttcaatctgatgcgataaaagatcatcaaacacgtcatcataaaatttcagccctgcttcgttcggctgttcttcatcaccattcgggaaaattctagtccaagctatgcttgtccgaaaacagttcaagcctaaatcagcaaagagctgatcatcttcatgatagcgatgataataatcaatagcatcatgattgggataattctcgcctgattgaacaccgtctgtaattctgcgtttagtttcattatcgcctgcggtcatcacatcagcaatgctgacccctttaccgcctgcttgccacccaccttcgaattgatgagcagcgactgcgccgccccacaagaaacctttaggaaatgctgtcaaaataatcctccttatttagtcctcgaaccatttacaattggtctgccgcttcttaagccgccgcctccgctgcaccttttgcctgctcatctttatatagtttgccatcatagaacttaataaatgggaaccaaatcaggaaggctacaagcgcacaaacgaaagctaaaacaattgctcgccaatcgcctgccgtgccgatgaaccctgaaagaccaagtggtgttggccatgccggctgtgcaatcatcggtttaacccaatgcattgaaattgcgaagtaagccatactcatggatgccatcggtgctaagagaatggaatcgctgtatatggattataaacaactggcataccgaaaagaattggttcgttaatgttgaagaaagctggaacaacagatgccttgcctaatgcaccaagctgtgccgattttgcaaagaaggcgataaaaataaccattccaagcgtagcgcctgatccacctatagtcacaaaacagttattaaattctccggcaaatgggatgtttgcccccttctgattcaactgcatattggagagaacaattggggtaaggaacgaggtcacaatcgttgcgccgtgaatgccaacgatccaaagcgcatgcatgataaagtagacgaccattagtcctacccatgtactggtcaggttagtaacaaaaccaaacggaatagcaacaatcttatagatatcggtgttgaatgccatcaaaataccattaatgataatgacagttaaggcaatcgcagcggtcggaatcaaagctgtaaaggaacgtgaaacaccagctgggacggtatccggcatactgaccacaatattctttttaacaaaccacgcataaagttttactgcaataatcgacatgataatggccgtaaagataccagtcgttcccagccgagttaccccacctgcgatggcataaccatctataatcttgttgtccttggtgatttcggtgaccaaggtcgctgtcccacctttaaagactaattcaggtatacacataaaaaacgccatcatagaaagcaatgcaccatttagaggattaatatcaattttttcttcctgagcctgaatgcgagtatattcataaccaaaaactaaacagaaataaagtgctaaaatgcccatggtcgcgccattggcaagcatatacaaatttgcaaccttatcaaaagaacccttccaaataccgactaatgccggaaaactttgggggagaacattaataattaaaaacattgatccaacgatggtaaatggaatggatgccattccggcagccatgactccgcgaacgattctgaacgaggcaagttttcccattggtcccatcaaatgattgttcataaatttaaacaatttattattacttgaatccatagttttgtctccttgtttgagctcattgtatgctttgagcaaatttatttatttgttgtaaataccgatcctgatttttttcaatcaaacggatacgcactaagagataaaaacatatgcctagaccaattaacagaacagtcgttgccagagataaacccttttgtcctaaaaatggaaacagttttgtcccagatccagcgacaattatggataagctcaggaaattgcttattaactgaactacataaccgaacttagtaaatggtaacttgctatctcttcgccagtacttacttacttgttcaaccgctaccactgcatttataacggtcaaacaaaacggtacccatttcatcgcgccctgtgtgcccaaactaagaaaaaaccaatataaatttgcaaagaaaaaaccggcggtcacgtaacggattaataaatagcgattaaagtacatactagttaagcttaattctctccgactcttgtcatatcttgctttattttggtctgacatgcgtgtcacattcctttcgcttagacttatttcgtagctaactttttatagaggtcaacgatttcccctgctaagtctcgaaatgtgattgcattcataacatgatcctgtccgtgcaccatcaataatgatactggatgttttttcccttgagcttcttcggttaacatacctgtttgtgcattatgtgcatctgacagaaagctgtctgcctctttcagttttgcttctgcggtagaaaaatcaccgacttttgcagctttaattgcctcaaaagaagatccttttgcatttcctccggccataattagctgcatgatcactagttgctcttgctcgttcatcctgacctcctactgctcgtcaatcagcttaagcgccgtttttagaacattttcgcctttcattaagccgtaatcctgcatattgatcacttgaactgggatactaagatcctttttgaaatctccctctaaataacgcacttgtggtccaagcatcaggacatctggcttttctgaatctaacttgtcatgggcatctgaagccgaagtagcaaagatttttgcttcaataccatctttggtcgctgcatcttccatttttttgactaccccagtttacaattcaagtgcaacaccctgacgactagaccataaaggccatgaagacctattcttgttagtgctagctaaacaagaaagcaggaatcttcatgacccactctcagactaacacccacaagcattaccaacaactcagttttagcgaccgtgctacaattcaggcccttcaggctgctggtgacaccgcgaccgtgattgcacagaagcttcatcgcagtaaagcgacaatctcacgagaaatcacgcgtggatctgtaactcagctcgactcgaagcgtcactcgcatcaagtctatcttgcggaaactgcccaagccatgcacgaccgtaaacgcgatagaaccggtcactacgcctttcttaagaccggccgtgcgttcttcaaggctctcgccagggagcttactcgtaagccgcgcgtacacagcgttgatagcttcgtacacttctatcgcgaccagggcaaggcttgcccttcaacgacaactgtctatcgctacatcgacgccgggctgcttgagctagacaacatgacacttcccaagaagctccgacgccgcatcaaaggctataagaacgcccacaagcgcaagaataagaagatatacggcgactcaatcgagttgcgtcctgcggccgtgaatgaccgcacaggcgtgggacattgggaaggcgacttggtcaaaggtattcgcttagctgatgagccagcattaatgacgctcacagaacggtacagccggactgagatcatcgtcaagattcctgactatcatgcgggcacctgccttaaagccttgcaggacacgatcgacgactacggggccaaggaatttgagagtatcacttttgacaatggttccgagtttgccaagttatcagagattgttggaacccagatttacttcgcacatccgtactcgccttgggagcgtggcacaaacgagaacgccaatggactgcttagggaattcttcccgaaagggaagtctctcagagcaattaccctggttgaaattcaagcagtccaatccgcactgaaccatcgtcccagacgtattctgaactatcttcgcccatgcgattactaccgatgcatggcgtaacagcctagaccactatcaagaattcgttatcatcgttgcacttgacttgaaaattgaggcatttttttgactaacatactggttgacatacctgctgcacaaactaacataattgtcttcttacccattagtttttcctcgctttcaaaatttcaaagttattgttcaccacagaatgactttttaatatcagcatactcgctagcttaacgagccatatcagaagtcattcgaatgactattcgttcgaacgacttttataataccaagaaatcgctttcttgtaaacgatttcttgaactttttgaaattttgtctctacgccttatcgcaaaaggccggcaactgataatgaagacttcaaatagcgataagcaaaaaaaagccttccagcaaggcatattaattgctggaaagctttataatttatattttaagtcaaccagttaagcatttgttaccggtttctccgcatcttccaataactgtcggaatggaatcagactttctgcatgatatttcttcacaaaagcatccacagcagcaggatcctgagtttgcttgtccaaaacaagttgttcaaccggaattggacgaagatcagaaatcttcacatcaatgacaaccggacccttacgatcttttgccttagcaaatgcggctttcaattcgtccagattgtgcacttcaaatccttgagcacctaacgcttcagctgccttaccataatcggcatcaattaaatcaaccccggagtgcggctgttgcgtgtcatcctgttcagcttcaataaagcccaaactctcattcgtcaaaacaacgttgatgattggcatatgatatttgacctgtgtcagaatatcctgcatgaccatggcaaatccaccatcaccagaaattgaccaaacttgccgatcagggaattccgcttgcgcaccaatcgctgctggcaaggcataacccattgtcgcataccagccagacgtcgtgaacacttgatcatcattggtcttcagataacgcatcccattgatggtaacattgccaacgtctacttggaaaatggcatctttttcggccatctcattgatcaatttgaagattggttcaacgcgcagtggcgtggagccatcatcttcaaatgaagtcatccactcgcgccaattttccttgttggccagagcagcccgataccaagcgctttctggcaattgatcagccttttcgctcagtgccttgatgaacttcttagcatcggccaaaacagctaagtcaaccgtgtgacgacggccaaacttgctaccgtcaatatcaacctgaatgtatttagcatttggtgctataaagtatggctggaatgggaaatccgatcccaagaacaagacggtgtcagcaccgcgcgcaacttcaacgccaggtttagaagccacacggccggccgagcccatgtttgccttataatcatcaggcacgattcccttagccaaggcagtcgtgatgatcggaatatgcgttttttctgagaaagcgatgatctcgtcgcgcgcaccccgcgcgccatttccaacatacaagattggcttcttcgcatctttcaagatatcccaagctgcggcaacctgatccgggtctggatcaggcaaaagcggcttctggtacagattggctgatgatacataattgtcatcaatctgggtccaacctaaatcctttggaatagtcacaacggcaaccccgttatgcttataagcctgacgaatcgcctcgtcaacaacatgaggcaattgctcagcagtcatggctgtacggttgtatacagacacatcagcaaacattgggttctcgttcatttcttggaaataattggtgttcatggcagcagttggtacttgccctaccaatgccaaaactggcacattatcatactgtgcgtcatacaacccattcagaagatgaacagcaccaggaccggcagaaccaaacgtcgccccgattcgacccgttaccttagcttcacctgcagcagccaatgcgcctacttcttcatggcgaacctgaacataattaatggtgtgacggcgattgtacagcgcattcatggtactatcaaaggaaccgcccggtaacccataaatattatggataccccagtcttcgagcaccttgatcattgcgtctgcggcgtttattttttctgtcatgacacttgcctccaatattattacttacattttgtaagttctttacgattacgagtataacaatttattgataacaatgcaagccctttcatctggtttaagcaaccttaacgcccaaattgcgaccttagcgtataaaacgcttaaactagcaagcgacgacaccataacagtcaaacaagtgaactaatacagcatcaccacgccataacatgcttggtaaatctttttcacaaattaacttcatgatgatcaggatcatggatcaaaaaacaggaccgtcgagggacggtcctgttcatcatcttattagctgtcaagcattaccgctgctgatattgacgttcttgaccgatcacaccggtcaaaacaaactgaccatgataataagtcggatcactacgataatcttctggatcataaggcaccttatcgctgaaaacagcttcgtattcaggaacggttaattcctgacgatcagccaacattttagcgtgattggctgcatgcagttgtgcggcaaaatccggttgcaagatgccgctaaaaaattctgccacggccccggagccatacgagaataaaccgatccggtcacccgctttcaagctagtatcattgtccaacaacgacagcagacccaaatacaaagaaccggtataaatattgccaactcgccggcagtaccgagtgcttgcctcaaggcgccgttgcagtcgctcgccagtggcttcatctgtgtccggcagaacaagctttaaagctttcttgcccattttggtatacggtaaatggaatgtcatcgcagcaaaatcacttgctgtgtgatggcgttgggtctggtatcgtgaccaaattgcttgaaaaaaagctaaatattgttccgttgaatactttccttgtgcaattgctgtgtcttgataaaccggccgccaaaaatcgtcaatagattcagaccgataaaccgaatcgtcttcaatggtcatgatgtgcggctctgctttgattaacatggcaaccgcgcccgcaccttgtgtgacttctcctgctgttgccaaaccgtaccgggcgatatccgcagcaatgactaaaacggttttatctgggtgagcggcgatgtagtcacgcgccatcattagtgcggcagtaccgccataacaagcttcctttaactcaacggcccgcaccgactcagggagtgccaataaatcatgaataaacaatgcagacgatttactggcatcaacaccactttcagtaccaaccaagaccatgcccaagctagcgcgaatcgctggcgtcaacaactttgtcgctgcattcgcacccatcgtgacaatgtcttggctagaaggtggtaccgcttgctcgtcttggccaatgccaatcgtatatttgtccggatcatcacctcgaacctgcgcgagttttactaaatcaacgtagaaatctggggtgtccatagcgattgcatcaatcccgattttcatcttttgattggcctactttcttgtttaaacgaatggttgttaaatattgttgcgcatgttttaaatccatactaccttgacgaagtgcgttcacaagcatcggcaattctgtttctgttgccccggcagcaatggcgagggcattagcttgcaacttcatgtgaccagcttgaatccccggtccagccaatgctcgcatcgcagcaagattttgcaccaacccgagggcggcaataacttgctgcatgatagctaaattctgatacccaccgagccgacggacaacctgcgccattggtaaagcaccgatcgccccgccaactgcccccatcggcaagggcagctgtaagtgaccaactaaatggccctgatccatataccagcgcgataaaggctgatacctgccagacgcacatgcaaatgcaccgatacttgctgcgacagcgcgggtatcattgccagtagccaatacagcaccaataataccgttaagaatgcccttgttgtgggtcactgcccgctcagcatcgacaaaggctaaatcgctaagctgaacaattttcttagcaatcacatctccagaaacagctttcgtcgctaaagaaaccggctcaagcgaaacctcagccgtcacgagttctgttggcgcgttggttagaatactgacaagcacatcaccgtctacccagcttgtcaccgccgctgcgaccgcttcggcaactgtattcgcataattggcccccattgcctgttgcggatcgagcgttaaacggattttcaagaactgcgctcctagtgattcgactgttaactgatcaagaccaccgccacgttgaatcatcgaaggatgcgcaaccgcaatgactttctgaatatcagtctgatgagccaaaatcgtttgccttgcttgcactaagtcggtcaagttagtcaggactacttcagcgaccactcgatgcgccgctacatgggtcctaacgccgccgtttgcagtcgcaagcctggccccattactggcagctgcaatcacagaaggttcctcatccgctataggcacttgatgtagctgtccattgaccaacaaattgcgagcaacgcctaggggtaaaggaaactcgccgatagcattttcgatcagacgcgctcctgtgacttcaggcaagctatgcgtaccagctaacaacgcagcatcctgtgttgttaaccacccttcttgaaccaattggtcacgccgtttttctggagacaactcgtaaaatttcatcacgatctccctcagacatgcatcgcgatttgcatggcgataccgatgccaccgccaacgcacaatgcggcaatgccttggcgttgattacgttcagccagatcgtacaataatgagattaaaattcgggcacctgaagctcccaatggatgacccaacgctaaggcgccaccattgatattgaattgttcatcctttaaaccaaggtcacgagccacagcaacgctttgtgaggcaaatgcttcattcaattcaatttgatcaattgccgcgatagagccgccggttgcctgcagtattttatcgatcgccagttttggcgcataccccataattgccggatcaatacccacctcggcaaaaccagtgatcgtcgctaaataatggagccccagttgttcggctttcgattttgccatcaggatcaaggcggctgcgccatcattaatgccgcttgcgttacctgctgtaacagtaccgccgacttcaaaaacaggcggtaattgggctaatttagccaatgacgtatcgggccgaatggctgaatcacgatctacgatgacatccccgtgacgggcagcaatcgtcactggggcgatctgactcttaaaccgaccctcagctgcggcggccgcggcgcgtaaatgcgaacggagagcaaactcatcttgctcctgacgactgacgttaaattgtgtcgccacattttccgccgtgattcccattggctgttgactgaaggcatcatttaatccatcgcgactcaaaccgtcaaccagcgttgtatcgccaaatttgtggcctgaacgaaccgcttcggcgtaataaggtacttgactcatgctttcggtaccgcccacaagcaccgcgtcagcctcgccgagttgaatggcagcttgcccaagccgcactgccttcaggcctgagccacagacttcattgacagtcatcgccgtgctgctagtggccataccgctttttaatccgatttgtcgggcaacattctgcccagaaccagcctgcatgacattaccaaagatcgcctggttgagtaacgctgggtcaattcgtgcagccttaatcgccgcctgcgctgccgcaacccctaaatcaacggcactggcgccagccaaatcaccacccaacttaccaatcggcgtccgtttggcacttagaatcacaacttcttccatgatgacctcctaaagagcgtgaacagccaaccggcgcataatcaagaacgagggcaatggccgagccattgttctcgtggttctgatgtgccggtttctgtggctatgaacgcgtttcgacaagcatatgctgagataaaccgtttcagtttatcacagtcgttcagatgacgcactgatataataagagcgtgagccaacccggttacaccgacttttgggttggcgatcgcctaaaaacgctactcatctccgtttactaaatagattgtatgcgattgttccccaaagcaacaaccatcttgaccaatccttaatgaatcatttcgaaagaaggctacctcatgcgtgtcaccgatttgctggctttactagccgatcaaaataaaaacgcctcggtgttactcgacacaaagccgacaccaagtcgttttgacgattttaagttaacaaccgttaatgatcaaccgcaactggtctttcagcctaatcctgagcgcaaagccgcattgcgcgtttgggaattgcaactcttactgaaccaacctgatttacagcaacgattcgtttatctagctgatgttgatgaaccgcgtgcgttatttggatttgttaaacggcaaattggcttgctgctcaattgattacgctggatgtttggtcgcagctaaccgtttagcaacgctttccaaataatgatgactttcaatcatttcccgacaatcaaactgatcctttaagccaatttcataaatccgactcgcatcttgattcaatagtggcaagacccgcgcccaatcaatccgtccgcggccaagcggtaaactatcatgcgtttgccccatggaatcaacaagatgatagtgccgaatcagcggcttcagatgcgctaggctggccatgagccgatcattatcgccatgtaacacaataaatgtatgactggtatcataggctaaaggtaaatgccagcgcaacaaacggtcttcaaaggtgggatcaccatatcggaaaatcggtgacatggaattttcaaacacgacatggcccggtgcttcctgagcaaaagcaatcatgcgcgccaaggcaatgtcttgtgctttgcccacatctgtccagccagcataatcaccaggcgtgtcaacgcggtatccgccgtgaatcaaagccgtggcgttagcttttttggcaaagttcatgagtttaaccgaacttgtcattaaaaagtcatagcgtgtaggatacttcgtcggattcatggcaagctcattacgctggccgcgaaaccgcatcggatgatgaaaaaccaccgttggcacctgactctgaactaatgctgccatctgtacaaaatgcgaccatccagcttcggtaaaatcattttcggtgagatgaaattcgaatacatcaggatgatattgcagccgatcacgaatctgccgctcatctgtactagcctttaagcctaatagcatgtacacttttcctccttaattcaaaacccgctcatgatcccaaaaattgctcataagaacgttaagcatcgctgaccaaggctctaagcggcttctgctacgctttcgaagcgctcctacttgtactttcaaatttcagttgtctttttaacttggcaaccggcgcattaaacgtttcaactttttacgatcaatcagcatcacacccaagtcatcggccaaggcgatcgccgaatcagaaaattcgctattggtgatcaccgccgcttcgtcgagctggtaaaaatgatggcccgcccaaacttcctgcacggccttgttgccaacgaaacctgtgtaacgcttgcactgaaagccaatcgttttaccttttttgcgggcaataatgtcaattccttgatcacctgaagcctgcgtcagttgaatgtgattaaacccattgcgcttcaacagatacgcgcaaaaagattcaaacttttcaccctccatgatatcgacagtttccattttcaaatcacgaaaacgaaaatgatgatgataaagcatgatggcattgatcacaacaaaaagactgatgattccaaaactagccggatcaccatattgccgcagttggcggggcagaaaactgcgggcccaaaagctgtaagcgagtcccaaaataaagagcccccacaacagctgataggcttttttgagtaacgttctcatgggtctacccctctctttccctttaagcctagcagattcaccgcgtaattgcattgaatctctgccaatttttctgtacgcttaagggattgagagaggaagcgttttcgtcatgcaactaagtgccaagatctttgccaaagtcggtagcgaacggattacccagtattctttagtcaatgaccatcagatgacgctacgttttttaacgtttggtgctcgggttcaacaggttcgcctgccaaatgctgcaggtgacgatcctaatctgctgctcgggttcgtcacgctggaagactacttacaccaacccggttacctaggcgcctttaccggccctttacaggcagctgacgctgagctagccccgggttcatggcaaaactggaattgggcggttaaaaccagtcaagaaaccgatctagccatcacattcaccctaacattacctgaaaatgctgacggtcagccaggccagcgagaactcagtattacccaccgattgacaaatgacaatttgtggcagattgacatgcaggtggcaaccactgccgacttgaaaatacatccccggctcaatttgccttggctgctcactgccgaccctgcccaaacaatgctttcagccaagttgactgccgatgaacatgttacccctgtccctaaaactgcccgctgtgagactgcgcaacgctattcccttgcggccgccgattggcagttggcatatctaagcgatgcttcattcacgagaattgattcttacgctggcatcaactccgaaaataattttaacggtattctcggccaacccaatgtagcagtcggcttttcgccggaaatgaaccaagacgctctgccgtgggtgttgccagccggtgcaacttggcggcatcatgcggaatttcacttatctagcaacgcaaactaaaaaggtttgaccccacggtatctgttgtggggtcaaaccttttttccaatcattgatgattaatagttcataaaaacatccttgaagactttaacactgtcaaagacgtcttttaaagtgacgtattcatccgtctcatgagacgtttcatttcccgggccataaatagctaaatcaagaccgtcatgatagaacaacgccgcatccgtgatgccggtgcgataggccacttgaccacgattcagccccgcacgttgacgggctgtctgtaccaactgaatcaaatcattatcaggtgaagccgcagctgcccctaaaacggaatcaattgacagactcaaccgaacacccttaggcactgtcgttttagctgcttgtttcaacgccgcaataaacgcatcattatccgcaatcatggttgtccggatgttaccgcgcaaatatgcggactccggaatcgagttgatctgattgccaccatggataatatcaatattatgcgtggcatgaccaagaatggggtcctcttttgcctgcaacggcgctgttgcagttagcgctgcattcgcaaatgcaaacaacccatgaatggcatttgcccctaaatctggccgagacgaatgtgctgctttcccgtgcgcggtcaatgtgtaatcaataataccgcgttcagcagcgtcaacattgctattgccgggttcggccacaagcagtccagttaaacgatctccgtaaccggcggcagacagttggcgtgcgccgtcattatcaacttcttcaccaactgtcgccatcaactgaattccatgatccaatttttcatgggcagcttgcttgaatgccacaaccgctgcagccagtccagacttcatgtcagttgcaccacgaccgtacaacttgccatcttctacatgtgctgagaatggtggaaactgccatttattgacgttcccagggtcaaccacatccatatggccatccacaccgagccagcgctgggcattaggattaccgatcgtcagcaccaaattatcacgaccgggcgcataactgatgcgttcccgtttaatcaatccggctttcaactcaggggctaaaaaggtttcaatcaggtctgctacctgaccttcttttgctgccacacttggtatctttaccatggcactgagtaaatcaacgacttgttcttcttctgtcaagataaggcctccacttatgatcgtttgtattctgcttttgtttggcttcggacagccgctcagcacaacatttaactcttatttccgtctgaatcgtaataatgcatgacccaaaattggcgtcacgataccgcccaacaaggcctcggctacggcgttaatcgccaaagccgtcatcaataaccatcctaggttggtcgcatccgcacccggcacaatttgcgctgctttactggcaaacatcaaccatgtaaacccaatgaccagcaaggtgttcgtcaaagcaccgacaacaccggcgaaaaccattttaacggtttgcgctaacggtgtttgttttttcttgaacaattgatgaaaaataaatgccgccaccaaaccaaccatgacacgcggcacgatggcgataatcggatttctaaacagcagcagggtcactggatcagtcgctgatgtatacgcccgaatcagactggttaacccccataataagccaaggctggcaccgccgccatagcctaatacaataccaccaatgatgacagtcaaatgaatcgttgaaatcgcaggccaagccggaaaaatctgcacatatccgaccattggaatataagcctgaagaataatcaaagcaccaagaataccaataatcgcaatattataagcttttccgcgttgcgtcatgcgctgctacctccaaattgtctaagtttgattttatcaaattatacacgttcgaggaaagtgatgctgggaggaagacttttaccggaaacgctagggaaaaggttggctgtcaaagaattcccgcgatggcgttgcacaaaacacgctcctagttggaggagactacacataaagacctcataaataaatgactgaaaatcggtcattgacttatccgccggtttctaaacacgtgagccagcccagaaactaacgtgtaagggccttggtcgcaatggccattgtgcggccatcccacttacactacggtttctaaacgcgttcgccaccccagaaacctgcctgtaaggaccttgaccgcaatggccaaacccaggccatcacggtcaagtccgcttacactccggtttctaaccggggtggcgaacgctcttgaaaaataaagtttgactttaaatccctaatttcctataatatttcttgtgcttaattagccatgcgggcatggcggaattggtagacgcgcaagattaaggatcttgtgagcattattgctcatggaagttcgagtcttcttgcccgcatcacaaaagacccgaccaacaggacatcttgttggtcgggtcttttttgccaccttagattttctaactaccggcaaggctctctagcagctgttttaatcaattatcatgtcacacaagtcattgaaaggagtttctctatgcttcgcgaagctcaatttatcgatctcggtgccattgttcacctctatcaacaactaaccgctgaaatggcgacgatggcccctgaaacttatcgtccattaactagcgacaatcgtcaatattttgccgactacttgcaaaatgaccttgctcggcttttcgtgaccgaaacggctggtactttaagtgggtttgcacttgtcgttttggctcgcactggcgacaatgcggaatttgttccgcaacattttgcccagctgatcgatctttatgtgatccctgcgcaacggcatcagggattggctaaacagcttatggacgcggttacggcttttgccaaaagccatgatgccactttcattcagttaaacgttttgaatgccaatcagactgcccaacaagtctatgccaaagctgggtttgaaccggtaagtctgattttgcaaaaaccgcttaactagccaacgtcttttgcaggcgcaatttaccgcgacagacaccacacgcgtaccgccgaacatcaatgtgacggcgacgaacgaattggcgaccgcaatgggtgcatacatacacgtactgatggccgttcactggcaacggtggcgcaaaacgtgacccgccaactgcagtcaagagctgcttaaagtcgtgatcgcgatgctgatacccgcgatggtgatcatataggtggtaatgcaccagctcatgtttaataatgccatcggtgacactcgcaggataaaccgcaaatagcttggggttgaagtctaagttcatatcagccggatgaaagcggccacccgtcgttttcagccgattattaaaaacagcgtgatggcgaaaaggttgatggaatgctttcaacgagatcgtctcaacgcgggcctgtaattcttgatctgtcatatctacctccgagccaatagtttactccaagtcacccgtagttgcatcatgacattttggttcctcaaaatggtcttaaaatatcaaaaacgagtcctctgagaaatggctaaatagccatctcgaggactcgtttttagtttaactgaaaaaggccaaaacatcatcacggctcatcgccgcttttttggcttggtcaaaatcagccacaattttaccagcatctaacacaatcaagcggttaccataacgtaaggcgtcttcaacctggtgagtgatcatcaagcaggtcagctgctgatcggagacgatttcgttcgtcagttgcatgatcgcctgactggtatgcggatcaagcgccgccgtatgctcatctaacagcaacagatccggtttccgcatagttgccatcaataggctgagtgcttgccgttggccgccagagagctgctcagtcggcttgtcaagggcatcagcaaggccattgcccgtcttcgctgctaaggtcttcagcgccgctttgctagccgtcatgccgcgtgatcgcaacgttagccgctgaccgcggtgactagctaagagcaagttttcggcaactgtcattcgtggtgctgtccccattttaggatcctggaaaactctggcaatatgccgcgcacgttgctccggtcgtttgccattcaaagtttgatcagccagcgtaatggtgccaccgctgactggcatatcgcctgtaatcgcgttgaataatgtcgatttaccagccccgttgttgcccaaaaccgttacaaattcacctttagcaacggtgaggttcacgtcctgaagcaaagttttcacttctgtaccaacgggaatattcaccgtaacgttggttaaggttagctcagccatgtgcttgcacccctttctgcaacacgcgccgtaatctcaagcgatgatcaatttgtggcaccatgatcgcgatagccaaaacaaccgctgagatcagttttaagtcgtcggcattgaaccctagtgcaagcacaaccagcaaaacgaagcgataaagaatgctaccgagaatcacggcaaccaaacgctgtgagagtgttaattcgccaaatacaacttccccgatgataatcgcggcgaggccaatgacaatgatcccaatgcccatattgacatcagcatagccattgttttgagccagcaaaccgccagccaaaccgacgagaccattacccaccatcagaccaagtaccatctgatgatcaggatcaataccgagactgcgcgccatacttggattgtcccctgccgcaataaacgcttggcctaactgagtatttagaaacagcattagcaagccaaccaccacaacagcaacgataacgccgataaccacactattgaagtatggcggtaaatcttttaagaacgctgtctggaaaagattggcttgatgcaacagcgatagattggcgcgtcccataatccgcaagttgattgaaaacaacccggtcatcaccaaaataccggccaacaaaactggaattttgcctttcgtggtcaacaacccagtcgccaatccagcaagcatccccgcaccggtagccaacagcgttgcgacaatcggggaaatgccatgagtaatggcactcacggctactgccgcgccaaatggaaaggtaccttcaaccgtcatatccggaaaatccaatacccgaaatgttaagaataagccaagtccgattaaaccatataataaaccttgaccaatcgctgatacgccaatactcatttgatcaccgttcctttcgcctctgccgttttgattaacgagctaggtaagtcgatgcctaacagttttgcttgtttttcgttcaagatcagtttaccggtggtttcaaaatgaatcggcgtcgttgctggttttgtctttccactcaagatgtctgccagcatccggccagttaaaacgccgagatgatgttggtcaagaccaatcgttgccaatccgccttgttcaaccatagtgtccactgttggaaaaattggcaccttccgcgtattagccaccgcaaccaaagtttgcatcgcactggcaacagtgttgtcagtcggcacaaaaatcgcatctacttgactaaccatttgtgtggccacctgatttaagtcatttgttgaactgatcgcgtaccgcttaaccgtgaagccttgctttggcccaagtttttcgaccattttagcctgtgtttgagcggaatcatcactcgacgttgcaatcacaccgagagttttggcattcggcataatttgccggattaatttcagctgcgcggcaatcggtgcctgatcagatacccccgtgatattgccacctggccgtttaacattctttactaactttgccgcaactggatcggtaatcgcgccaagaatgatcggtgttttctgattgacattggcaagtgcctgagccgatggcgtagcaatcccaactgttgccgccgcatgttcctcagtaaagcgttcggacatggacttcagattgctttgatcattttcggcattttgaaaatcgatcttcacattcttccctgcaacatagcccttctccttcaagccatcaataatccccttgtgaatcgcatctaatgcgggatgtgtggtcaattgcaggatacccacagttggtgttgcctgtgtctgtggtgttgtcgtgccggtttgaaaataggcaatccctaagaatgctgccataatgaagatcaaccctagcattcgtttcatgtttccgcctccgttttaaattaattcatgctgtgcccgcttggacttaatcagttatgattcataacgcgctcgtcagcccagaaaccggaacataaggacctcagacagaaatggccaaagcccagccgtttctgtctgaggccacttatgttccggtttctaaacgggctggctcacgcttacaaaaattgccgcgacaggtgaggactcgtcgcggcaataaaaaaagtccgcatagtcccacttttggggtatctatgcggacaaattgaacagagagccaacatagacacaacctgcgcgtctggcaggttgcgtctgcaacctacctaaagttggctttgccaagcagaaaaggtaagcaatgctgtcatgtcggtttcctccgtcctagttaattgatttgttgttagattaaagatacgtgagtaaagttctcatgtcaagtataagcttaaactttttttgacaattttgaccagcttaagacaacatgactgaaattttttggatttgcttggtgaatttttgaattgcctcgtcctgagctttttcagctgcgttgaaagctgccacatcaacttgccgatccgcgtgcaaacttgcggtcatcgccttacatgcctctgtgaaagcggcaaaatcacgtacaagtgtatgatggggccccaacaatctgactggcgccgcgacttgctgcaacttgacaagcaacgcttcatagttacttgtcccctcgctaaacacggtttgcgtttgttggtaagcctcaaggtcgtaatcggccaacttgttctcatcaatcgccttgcgcagcggttcaaacaacggcgccattttctcttggttgtcttgtgtggcttcaacgaccgcattaatggtcgtcccatagtttgctaacttcatttgttgtttattcatgtgcttcatccttttcatcggctcattagccggtaattaacgcataaaagccttgactgtcatgaccgttacaacacggacatcacggtcaaggctattcctattgttttttgactctaagcaatcttgtggtgtcttatgcgcgttgcttgcgtcgagcacgttcgaaaactttaacgatctcaacaatgacgatcatcgccacaccagccccgagaacggtgatccattgatgccaatcaagcgatgtcacatggaacagaccattgaaacctggcactaaaatcgtgactgccaacaacacgaaggaagccagaatcgcccagttaaaggccttgttccggaacgcgccgaccgtgaacagactttgatggatactcttcacgttgaaggcatggaacagctgaatcaagcccagcgtagcataggccatcgtcaaagcatcggcgtgaatcgcagctgagccgctgtgcactggataggtaatggcaatccagtaaacgccaagcgtcagcagaccttcgagaattccttgccagataaccgcggggccaacgccgcctgagaagaagtttgacttccgaccgcgcggcttttgcttcataatacctggttcagttggttcaacccccagtgcaatcgctgggaacgtatctgtcactaagttaatccagagaatatgcaccggtgccagcaaatcccaacctagcatggtcatcatgaataaggtcaagacttcaccaaggttggccgacaacaggtactgaattgccttttgaatattggaaaagacttttcggccttcttccaccgccacaacaatggttgcaaagttatcatcagccaaaaccatatcagaagcacccttggaaacttcggtcccagtgatgcccataccgatcccaatatccgcagctttcaaagcaggcgcatcgttcacaccgtcgccggtcattgccacaaccttgccttttttctgccaagcattgacgatccgtaccttgtgctctggcgcaacacgggcgtatacactgtactttgccacgttctttgcaaactcatcatcactttgctgatctagctcagcaccggtgatgacagcatcatcatcgccttggtcaatgattcccaaccgaacggcaattgcttcagccgtatcgcggtgatcgccggtgatcatcatcgggcgaataccagccgcttttgcctctgccaccgcagcttccgcttctggccgttcgggatcaatcatgccgaccaatccagcaaaaatcatgtgattttcaaccgtatcggaatcaactttttccggtaaagtatcgatgaccttataagccatccccagcacacgcaacgcctgtgtcgccatgtctttattggctttcaaaatggcatcgcgttcactgtctgacaacggcgccgtattttcgccagttgctaggtcagtcacccgcttgagtaattcatcaggcgcaccctttgtggcgactagcaacttgccatctgcgcgtcgatgaactgtcgtcattaattttcgttcagagtcaaacggtacttctgcgatccgcggttcgccagtgagtgctttggcaacatcgtaattctgggtttttccataagcaacaagcgcagtttcggttggatcgcctagtaacttaccatcgtcttgcacctgtgtgtcgttggcaaagttcatgatggtcattaatggattgccgccatgaataccagcgcttgcatcattaagctgaccgtcgtaataaactttttcaaccgtcatcttattttgagtaagcgttccagttttatcactcgcaatgatatccgtgctgccgagggtttcaacagcaggcaatttacgaaccagtgcatggcgcttggccattttctgcgtacccaatgctaaaatgatggtgacaatggctggcaacccttcaggaatggccgccacagctaatgaaacggctgtcaggaacatttctggcaagcttgccgcttgacgccagataccgactgcaaacacaatcaccgcaatcaccaaaatcatgaccgtcagcgttttaccgagacttttgaggttctcttgcaacggcgtgttggtttcttcggccgaattaatcatcccggcaatgcggccgacttcagtttgcattcctgtagcgatcacaacaccgacgccacggccgtatgtgatgttactgttcatgaatgccatgttagtgcgatcgccaattccgacatcatcagcatccaacggcgccgtcgtcttatcgaccggcacactttcacctgttaacgcactctcttcaattttaaggttggcactctcaactagtcgtaaatctgccggtacgacatctccagcttcaagtaacacgatgtcccctaaaaccagttggctgctaggaatggtcagcacctgatcaccacgacgaacatgggcgttaggggtcgacatttccttcagcgcatcaatcgcttcctcagctttactttcttggaaaacgccgaaaaccgcatttaataagacaacggccaagatgatcccggcatccgcccactcactgagtaaaaagccggcaatcaaagcggcaaccaacaagacaataatcataaaatccttgaactgatctaagaaacgggctaacatgcccttcttttctgcctgcgcaagttcatttggcccattctcatttaaccgtgtttgtgccgcttctttcgttaacccggttagactagtctgttcttgctttaagactgcctcactgcttaatgcatatggcggtttgtttgccaaagtagtgcctccttcgtatttgggccggtagccaaaaagagacctatggactaccagcagtagatccataagtctcactatttaagacaacaccagacatagccttgttggtgacgttgtcgcagaatactctgctagttactcccctatgttggttaaagtatatcaggtgcgggtcatgcttcgcaaggcttacttgcgaagagcgtgaacaggcccggtttctgggcctgcaaacgcgtttaatcagagcagagcgtgcaagtcgtgttagaaaccagcataagtggccttattaggcagccattcagcccaactcactaaataggtgaaccgctaagtcatgcagattcagtgcatgcgaattgtagttgctgagcaaaatgacggcattttggccatcatgacttatcgcggttgaggccatctgaccggcgacgacaccgttggttgagtaaaagtcagcatggttataaataccagcgttataaacaccatcgttgcggttacgcaatgtttttagagttgaaagtggtaatactttccctgtatcaataccacgcaacagccggtataagtcaccggtggaagtatagacattgcccgtgcctagttctcgattataccaaactgctggttcaccaatcgcagtttgataaggattagcagccgggccagtgtaagtgatagctcgctcaggatctgtcagcattgcgggtaaaaagcctgtgtgcttcaggttgagccgatcgaaaatattgtttttgacttgctgctcgtatgaacgaccagcaactttttctatcacaccagcaagtaacacgtaattaactgcttgataagcgtaattatcctgcggcagataggttaagttggcaatcgaccattgaataatattagcatcatccattacagttggttgatacttacgcaaactaaagccgctgcgcatagccaccatcatgcgcaaagtcacttgatcgccggttttgatgccagttagatatttgccaaccggatcatccaagctgagcttgccagaagcggccaattgcgcaagcgcaaccgcagtcacggctttttgaattgaaccaatctgaaacagcgtggttggaccgttgcggcgatgtgtcgtcgtatcggcatcaccaacgccattgttaaacacgactttgccgtgcttaatgatcagggcactgccaataaacttgtcattggtcaactcttgctcaagtggttggccttcagtcgtcgtcgcggcacgatccaaggtcatggccaatatttcttcttttgatttaccccgatcctgacgtaccgcttttgtgactgtctttgcggattttgacttcgtattcacggcggatcggctgttttgctgccaaaggtacgttcccgcaccaatgctgactgcacataaaatcagcatgacgcccaaccaaatataacgatgcttccccgacatcttaaaacctactcctttaaatgcattcacgagcgcaaaacctttatgtgaggaccttaaacctaaatggccgctcctatacttcggtttcaaaccggctcagttcacgctcttatctaaacgcgctcactggcccagaaaaccggctcagctcacgctcttccaaatttaacgtaagcgcacgattgtgaggtacatttaaaacggcttcggattcccttatgattgaggaaatgccgaagccgttgtcttttattgaggtttatcttgcacagattgcccggacttgcgacgaccatggtaaataatcctgcagcgctttagaatcgccaggaacggaaaggttgggtaattcagtaaataagtattcgaggtatttgcggcagtcgagaccgttggcctcagccgaacgcatgacactcaagataatcccgcttgaccgggcccctttgaaactcgtggagaatagccagtttttgcgaccgataacgagttccttgacggcgcgctcaacgcggttatttgaaagctccaaacggccatccaacaacacattttccatggcttcgcgttgactgagtgcatagtcgatggcgcggccgaatttggattgcggtaaggcgtggacactttcacaccaagtgaagaaatcggacatagttgatttcagttgactttggcgtttttgatagcgctgatcaggggttaataaccgccatggccgctccatcttgaacatgcgatcacaatatgtcacacctttcttggcaccgctttgcgtgttgccctgtttacccatggcctcgaagaacttacgtcggatgtgggaaagacaggcgactcgggtgacctgatcaagtttgtcgtacacttgatagccatcggtttggagataatgtgtatacccgttgaggaagttcttcgggacttccgtggcgcgggaatcggcgtgctcatagagaataatctgctcgtcttccgcgcgtccagaggcgaaaacccagaaataggtgtttactttctcgctttccaacacgcgatagctggtttcatcggcgtggacgacggtttgtttgagcagtgtttgatgcatcagttcgtagagattgcctaacccatagtcacaagcccgaatgtgccagttggtgatttgttggcgggttagttcgagccccaagtctccccaatcctttatctggcgataggctgggacctttttacgatacttttcgatcatcgtttgggttaggatgcttggtgaggcaaagctgttaggaatgaacggcttcggcactatcgcctttttgatgacgctgtgatctaactgattggaacactggcgacattcataggcgtgctgatagtggacgtggacttcaacgtgttccggaatccgaaccggttcgcggctggtcgccgtggccccaatttcacgcatctcagcggcacaatgtgggcactggcgttccgctccggttagttcgtggtgcacagccacttcaggaaaaggagccagttgcgctgctttcctgcctttttgttttttacgttttgcaggtttgtcatcttgctcttctggttcaggaactgttggcgccacaaaggttttggtttgatcaaagagatcaacctgaccgtcagtgagactttcacgcttagtgccgtacaggcgccgcattaagaactcgacttgttcgcgaagcagcgcgttctcttgtttgagatattcgaattgttctgtcgtcacgactgcttccgctgacatctcgcgccctccgttaaaatggttgaaaaaagtatatcaagcggccacacgaaaagaaagccttttcgtcagcttcaagaaaagactttctttcagacaatcagtacacataccccggggttacaggctgaatggtacggcgttcttcaatggctaaaccattgaccagacgtgacatttgacgataattcaaacggcgaatttcactgcgatcgcgcggccattgcatatagccgttttcaaagcgcttgtataaaagcagaaaaccacttttggtccaatacagtgctttgaaacgatccttacgggtaccacagaagatgaataacgcattgtcgaacacatccatcttgtactcctccgtgaccaaggccgccaagccatcaatgccttttcgcagatcggtgcgaccgcaaatgatgtaaatgttagctttggacaggtcgggtatcatgggccatcaactcctgcaaaataatccgggccatcaccttatcgatgccattgtagaaaaggacttcggcttcgtttagtttaattttggctcctagtttgggtttcaccacgacggcggcaccgtcgcgattgaccatttggattggaaccagatcattggtttgagtcataaagaaatcctccaatcttcttgatagaccaagtatagagggaggattttgacaattataggtactgcactatgtgacgcttacaatttaacttttctggacgcaaaaataccacattatccagcaaaaagacagcccgtcgcatcactgattgctatcggtgatgccttggctgtctttaagcgttatttccaaaaattatcgaaaaccgtgattggtaaatgccgcttgtgggcggttttttggtaccacttttcaatcgtttcagcagcttgatcagtgacgtcttttccttccaaataatcatcaatgtctttgtacttgacgcctaacgcaacttcatcaggcagcgctgggcgattgtcttcaagatcagctgtaggggccttttcatacaggtgtgccggtgcgcctaataccttcaaaagcgcggcgccttgtcgtttgtccaatcgatacaatggcgtcaaatcagcgccaccatcaccaaatttggtgtaaaagccagtcacggcttcagcggcatgatccgtgccaatcaccgcaccggcattattgccagcaatcgcatattgcgcgatcatccgcatccgagccttgatgttgcctttgttgaaatcagaaatctttgacccatcagcctcaaccgccgcgaccattgcatcaacactcggcttaatattcacacgcttgacaacatcagcgtgcataaagtcgatagcagccatagcatcggcttcatcggcttgttcaccataaggcagacgaacggcaataaattgataagcatcgtcgccggtttctgctcgcatttcctgcatggccttttcggtcaaagcgccagcaagactcgaatcttgcccgcccgaaatgccgaggacataagtttttaaaaaagtgttctttttcaaataagcttttaaaaagtctacactacgacgaacttcagtttccggatcgattgttgcttgaacacccaatgctttgatgatttctgcttgtaatggacgcatagtcaaactcctttaatcatattcagatacaaatttttaatgagactttgggttatcttgtccgtgttggcaagcaagacaaccgcgttttggccgctggtatcaatcatggtacctgcagattgcgaagccaccaccccgtgcgttaaggtgtagcctccaaaattataaacccccgctgtgtactgaccattatccaaattccgcagtgccttcaatgaagcagttgaaatgattttcccctgattcaccgccttgatgatctgatacaaatcacccgcacttgtataaatattgccagtacccagttcccgattatagttcacagaaggctctgtgtaccgttttgcgtagggattattaatgggaccactataaccaaacgcctgattcgactcgtgaaacaactctggcataaacccagagtgagtcaatttcaacttcttgaaaatttcctgttgaatcaaatcggcatacagtcggccagtcactttctcaatcacaccagccaacaaaacataattcactggttggtaatcataacgaaccgttccataatttaagttggcaatcgaccaacggacaatgccagcgtcagaaagcgaagcactctgcgcacgcgtcaatgataagccgctacgcatgttgagcatcatgcgcaaggtaacttgcttgcctgtcctaatgccggtcaagtacttactgatcgggtcagacaaatgcactttgccttgttcaactagtcgcataagcaacacggcagtcaaccctttttgaatcgaaccaatttgataaagtgtctccggaccatttaaacgtccagattcagcatcggcatagccaagtcctgtgttcaaaataattttgccacgtctgatcatcaacgcagtaccactaaaatgattagcctccaatattttcataaacggcttggcttccgcctgattaactggctgcatgagcttgtcagtcgcggatgtcgctgttcgcgtttcattttggaggcgttgctcaaccgcccgatgtcggttcaattctgtttcatacttacgccgagtccgctcttccttagcctcaatctgtggcttcaaataaaaatgatcgtaactcgcataagcagctattccaactacaagaccgactagtaagctaaggattagccaacgatgctgcgatcgccttttcgatgccctcatagattattcctcgcggtcagccaccgctgatttgactgctttgatcagatccatcttgttgtcccaaacccgttgcgacaagtctaccgggtagtcctgtgggttcagaatgcgtcgatattcatcccataatgcgttggtactccgagtggcatatgcttggacttcttgtaacggtggtgtgtgataaacctgctggcctttgtcataaatcgtctgtagaagtggcttggcttcaaaatttttaaccgttttattgatgtacggaaagttcggatggaacatataaagacttcgttgtgtatcaatggtttcatctgccaaggcaacataatcgccttcagatttgccatcatcttgacgcgtaatacgccaaacctgctttttgcccggcgttgaaactttctcagcattgttcgacaatttgatcgtgtcgcgcattttgccggctgcatcttcaattgataccaacttaaacacggcgcccaatgccggctgatcataggcggtaattaaacgtgtcccaacaccccaaatatcgattttggcaccttgcatcttcaagttctgaatcgtattttcgtcaagatcgtttgaggcgtaaattttagcagattcataaccggcatcgtccaattgttgccgaactcgcttggagatgaaagccatgtcaccactatcgatccggacaccaagaaagttgatcttgcctttaaactcattcgcaactttgattgctgcaggcacaccagaacgcaaggtgtcatatgtatcaacgaggaaaacaacatccttattgctgcgggcatatgctttaaaagcatcgtaatcattgccataggcctgaaccagcgaatgagcgtgggtcccactgataggaataccgaattccttacccgccaatacattactagtcgcattgaagccgccaatataagcggcccgtgtgccccacaaagcagccgccgtttcctgtgcccgccgtgtgccgaattccatcagggggtccgcaccagcaacgctgcgaatacgggcggctttggtcgcaaccaatgtttgatagttgatcatattcaaaaccgctgtctcaaccagctgtgcttgcgccaatggtccctcaatttgccaaatcggctcgttgttgaataccaagtcgccttctaaagcggacttaacagtgcaagtgaacttaagatgccgtaaataatcaataaaagcatccgaatagtctgtttgcgactgcagataagctaaatcatcttcagaaaacttaagatgattcaggtagtccatcacatgttccaatcccgcaaaaacagcaaaccccgaaccaaacggtaaatcccgaaaaaagacttcaaacacggcattgcgttcgctaatcccctgttcaaaaaaggtattcatcatatttaattcgtaaaaatcggtgtggagtgtaagtccttcacccaactgtgtggtcatcatggctccccttccggataagtggcaacaacaaacaagcgctcgtataggcgcagtgatgcttaatttatagttcatcattatataccattcagagaaaatgggacagagcgcgaacaggcgcggttagaaaccggagcataagtggcctcaagcctaaaatggctgggctttggccatttaggcttgaggtccttatgtgcaggtttctgcgcctgttcgcgcatttcgaaatcagcatagcttaggctcagattccctttcaaatagcatcaaaaccaacgaaaaaagccaaagaacaagatgccatcttgctctttgacctttccaaatgcctagcgtttataaccaagcagcaaacattaccgttctagataaaattcaaatctttcgccaacatactgcgttcgaacgtattcaaacggcgtaccgtcctgcaagaatgatacctgacgcaaacgtaggatcgcttcgccacgtttgatgtccagatactctgagattcgttcgcttgccagcatcgcactgacagtctgttgcgcaccgccaagcacataaccgccttttttctccaaggtatggtaaaaactggctgtcatttctttcttggtaaagtttttgacgaggttgtatggaacagccgccgtttcaaagctaatcggaatcttatccgcgtaacgaatccgttccatgcgcaagacttgttctttaggctcaagtttaagtttttcaacttcagaacttgttggctgggccacgtggtaggagactgtcttactggatggcaccttgccttgtgcttgcatcagatccgtaaagcttgtgacgccagacattttctcttggactttctggttggcaacataggtaccggacccgacgcgccgttcgagaatgccttcatcgaccaatgtttgaatggcttggcgcaacgtcatccgtgacactttaaacgtgacagctaaatcacgctcagaaggaattcggtcgccaacgcgccatttgcctgcttcaatatctgcccgaatcgcgttatgaatttgaatataaactggtgcatccatgaatgatcgcctccaaatcgtggttcagtcttcggtgtcgtgtttaacgccatagctgtaggttgcaaccaaatcgttattgcgatccaaaacgttgatatcggcatctttcccgacttcaagcgtgccttttgatgtcaggttgaattcccgtgcttggttaaccgatgacatttcaacggcatcaaacaaggaagcatccatgaagctcatcgcattcttaaaggcatctttatacatcagaactgagccggcaagtgtgccgtctttaagccttgcctgcttatctttgacataaactgtttgaccgcctaattcactcttaccttctggcatgcctttgctacgcatggagtcggtaaccaattcgattcgttctggtcctttttggtcaaaagcgaggcggagcatatcaggcacgatgtggaagccgtcacagattaattcacaatacatgttgtcttcaagcatcgcatgaccggtaacaccaggctcgcgatggcgcaggccgcgttgagcattgtagagatgcgtcacatgtgttgctttgctatgcagcatctgttcgcgggtagcgttactgtgaccaacagaaggcacaatgttgtgcgccaacaagtagtcttcaaatgcttgtgacccttcgtcttctggcgcataggtgatgagcttaaccagaccaccggataattcctgccactgtttcactaaatcaacattaggattcttgatatattcttcaggttgggcacccttgaagaccttactgatggaagggccttcaagatgcacgccttgaataatgtggttgcgttcagccgcctgtttaacgccacgcatggctttgtcaatattctcagttgactgcgtcatggtcgttgcaaaaagggtcgtcaccccttcgtgcgtcatcattttcgttgccatttcatcaatctgatctgcatcaccgtccatggcatcaaagccataaccgccgtgagcgtgaacatcaataaaccctggaatcaaggttttcccttgaaggtcaaaagtctgttcaccagattgggcgcgataatcaaacatgtcgccaactgccaaaattttgtcatcgaaacgaacatagccgtcatcgatgcgttctaatccagtatagatcgttgcgtgtttcaatactgtaaccgtcacaataccactcctaattgtttaatgcttcattcgacagataacatataccagtataactggtatagaccaagattacaagctataccttcgtcgtacaacgtcatacttatccttgacgatccttagcaatggttgcgtccactcccttgataacggcagacatgagccctgcttgctccatcgccaacaagccagctactgttgtaccacctgggcttgagacttgatcaatcagatcaaatggcgattgctcgctggccaaaacattttgggcactccccatcactgcttgagcagcaatggctgttgcctgttttttagttaacccatacttaacgccagcccgcgataggctatcgatgaataagtaaacaaaagctggtgatgaccctgccaacgcgacaaatgtcgaaaattgatcctcaggtaacgccatagttttacctaagacgttcaataagtccagtaagccatctaattgacccgcaacactatcattagccgcgtaagccgtcatccccgcgttgatagccacattcacattaggcataattcgcaggatcggttgatcttgactgccaagggcatcttcaagggtcgccagtaaaacaccggtaagcatcgaaacaatcggtacctgccgttgtttgagcgttggcccgattgtctttagaatcggcacaccaagtttgggggcaacagctaggaaaacgatatcggcagtgtctgcaactgcctgattgctcgcgaccgctttggcgccaattttggcggcatacggttcatagtgaatcggttgcccgccatgcagaacaatttcctcaggcgtgaccgcatttttagctaacaaaccagtgatgatcgcccgtgccatattgccggcaccaataaatccaattgtcatggcctgcctcctttatgcttgatgactttcttctgttgctgaatgggtcttgaaccaatcgacgagggctgctaatcgcgctagtcgcagattcggtagcccgctgcgagacagttcatgcgtggcattgggaaagcgcatgaacttagtatcaacgccatgcaacttcaagccaatataaaattcttcgccttggccaatcggacagcgttgatcattttcactgtgcatgaccaacgtcggggtttgggcaaagtcgatatgggctagcggtgaaaaatcccaaaggcttttcacatcagataaatcagcggtccattttccttcgagttcccaaggtgtgaagaagtagccgatatcacttgtaccgtacatactcaaccagttagcaatagatcgttgggtaacagcagccttaaatcggtgagtatgcgtcacaatccagttcgtcataaagccgccgtatgatccgccagccacatacaaacgatcaggatcaatggtggtatccaacttcaaggcttcatccactgatgccatacaatcctcataatcgccttggccgtaatgtttaatcacggccgctgtaaaggcctcgccataccctaacccaccgcgcggattcgggcagatgacgccgtagccttgagcagccaagaactgcatttcgtggaagaaggtatacccataaccaactgccggtccgccgtgaacatataaaatggctggatgagaagctgtcgcctgctgtggcgggaaataccaaccttcgatctcgaaaccatcgcgctggaagttaaatgtttgtggcgtcaccaaccccatatcgcgtgttacccgacgattaggatcataaatcacgtgttcttcttcagtcgccaaatcaaagtagctcaatcggcttggaaccgtcattgtgctttccgtaaaaacaaccccgtgatgatccggcgttaaagcgtaatcagttacatgccgacgtccgccaatcaaaggtgtcagctgctcgtcgggaccgcctgcatacaagctcgttttcccatggttaaaaccaatcgtcagataatagtcggcggtggcaaaatcagccactttttcagataaatcctgttgaaaatcgccattaacgtgtcccggaatatcaaaatcaatatcatcggcgacatcttgcaacgttttggtcgctaaatcataatgccacaagtgactttgcgacacatttggcagatgattgtccgaccccacaagcagcaattgcttgccatctgctgaaaatgcttctggcgataaggccgcttgcggtaactgatcattaaccatggttacctgttgatcagctaaatttaacaaataagttgcctggctaaaatcatttgggtcatcgggcaggcgctctgcagtaaatgccaaggtctgtccgtctggagaaatcgccccgacttcaaattcatgctcccggcccattaccaaacgactggtcttttgacgcaggcgttggactcgtaattcataagcgacatgttctggtaataagccgaccccatttaacttatagggcacacgtgagaccgtcaccggttgtggccactgcttatccgtctttttcggctttgcgccaactgtcgtctgaataaacagtgcttgactgtccgcttgccaaccaaagtaggacacgccttctttttcagcagaaaattgcttggcagtaccgccattgaccgcctgtaagaaaacttgagtcgttttatcggatgcttgactcaaaaaggccaaccactgctgatctggactaagcagcggatgccgatcatgtttttgatcaaagccatacgcgatagtgccgccacgatgattgacgaaacaaatgcgctgataataagtattatcggcctccgaaatgcgattttcctgaacaaagtagccatcatctgtcgcacttggatacgacaatgataccaatttaaaaagatctgtcgctttaattgccatacgatcacgcccttcctcatattgctttaagcgtagcggttgggctataccatgtcaattagctggaccgcttgaaataaaaaaaacgcatggcctccgccatgcgtttacgtcttctatcgaactttaatactggatggaggagataggattcgaacctatgaacccgaaggagcggatttacagtccgccgcgtttagcctcttcgctactcctccgtgtgattgctgcgaatcaacttaaatagcatacaaaaatgcgattcaaaaatcaacagcatttgtctgatttttgaccgcatttttcgtattcttaaaggtgatagcgttcaagacaacgttggcacggttaatgtcacaagcgtctgccgccattcagtccaccaatcttgactctgccactcgaataatcgttttaagccatatccaagcggctgatgataatacgtagtaccgcttaaaagcttaggcgcatcgcgaaaatgctcatggccgaacaccactgccgacactctacctgtcagcaaatcgccgagtttggccgaccccattagcgccgttgccatctgccaaggcggccgatcaactgtgtacaccattgcctcacgaatcggcacaaaatgcgtcacataaatcatctggtgcgtctgattcgcttgcagcgctgccttcgtggtggtcaaaacccgttgcattcgcgcagcatcagtgacaggcgcgtcaatggcactatcaatccaaaaggcgcgtttccattgagcatattccgcatcggttttcatattgcccagctgtcctagcgaataatcataccagccattgttgccaataatgacagcattggtgccaggcactggcaaaatcttttcatgcagatacagcggatcaaccgctgattgaatttcatcgtacgttgcgccattcaccatatcgtgattgcctgccaaaaagcgaatggtgactgcagacccaacttctgcctgcagtgcgcgaaaataagccaaagatttggtgaagtcattgtaagtatcaccggcattcacatagatctgataatcatgttcaaccagataagcggcctgcttcttcagcatctcaaagccatcgacgcgattcacatcaaaatggttgtcaacactgaacgcaattttcaccatcagcgcacctccaccaaattttgtcagcagcatggaccaaatgacgttgaagcttcgaagcctaattaacaccttgcattaatttttcgatccgtggtgtgaagaaggccaggacaaccgcaaagccaacggacaccaaacccacaatggcgaaataagccacctcgtgatttggcgtataaaaccggacaatctgcgcattcacggcttgtgccgaggcatcagctaagaaccacatgctcatcatttgtgacgaataagctttcggtgccagtttggttgtgactgacaagccaaccggagaaattaacatttccccgatttcaacaatcgcccaactcatgaccagccataatggtgaaactttggcgctgctgccaaacagcatcactgggataaccatccataaataagaggcacccgcaaaaattaaaccaagataaaactttttcggcgatgtcggttgccgtttaccgagtttcatccataaccatgcaaaaagcggcccataaagcaaaataaacaatggatttaaagtttgaaaattaccagggagaattttaaaaaagccaaaatccagctttgtctgttgggccgcaaaaagcgccaacacgacagacccttgttcttcaatggcccaaaaaatcattgctgctaaaaacagcggaatataggcaatcacccgtgatcgttcagtcttcgtaacttttttactacgaatcatgagcacaaagtaccaaatcggcaagccaatcgcgattaaggtaatcaggctgatcacgttggcaatcgtcagcgcattgaacccggccatcgccagtaaaatgacaccaacagccgcaattgctaccaccacacggatcaccaatgggcgaacatcttcaggcttcaacggatcaggagcagtattgtcagctgggttaatatatttacgcccgtcaatcacgtaaaagatcaggccgacaaacataccaatggctgctagcgaaaagccagcatgaaaattgactttatccgccatccacggaacaaaaataggtgcaatgagcgatccgaagttgatccccatgacaaagatactaaagccagaatcgcgtcgcaggtcatcttccggatagagactaccgaccatttcagacacattgggttttaataagcccgtgcccagaacgattaaaacaatcgaaccaaacagtccagtcgccccaattggcaatgacaaaacaatgtggcctagcatgatcaacacgccgccccaaaaaacggttcgccgtgagcctaacaaccgatcactaatgaagccgccgattgtagcacttaaataaaccagtgacccataaatcgacatgatcgataacgcagtcggctgatcaaaacccaagccgcccttctccaccgcgtaatacatgtaatagatcagaattgcccgcatgccatagtaactgaaccgctcccagaattcagtcatcgacagggttaatagcccccggggatgccccataaacgtgcgatcctttgaattattcaattgaaatacatcctctcactaggaaatgatcccctagctgctctcatggcacttccctcaaaatgccaatcaataaactatcattatagatgtattttttggtgaagacaaataggcaagagcgtgagctggaccgggtagaaaccggagcataagcggccttgggtgtgatggccaggttttggccattgcgcccgaggtccttatgtgtaggtttctgggccagcaaacgcgtttatgaggagcgcgagctggtccgagtataaaccggagcataaagttgccgcggtccttatgtgtaggtttctgggccagcgaacacgtttatgtgaagcgtaggcaggtccagttaaaaaaccagcaccaaagcaaaaaactgagtcaacattcccagatgaccgcctgtccgccaaaaaacggtgtgtggcgcaaatcatcgagatatgttgctcagttcttttacctaattatgcgttagtccgcgcgtaaagcaatcgcagcgtctttgttggctgccatgcgggcaggaatatgaccgccgaggacagtcaggatggtgctaataagaatgaggatcacggcatgaatcggattgagttgagcgacattcggcaactctgtcatgctataaagaatggcattgattgggaaggtcaataaccacgcgataatgatccctagaataccggaactaacgccaaggataatcgtttcagcatcaaacacacgcgtgatatccttacgccgtgcacccaaagccttcagcaccccaatttccttcgtccgttcaagcacggaagtatacgtcagaattgcaatcatgatcatcgaggtcaccagtgagatgccagcgaaggccactaggacgatagtaatggctgacataatgccaccggtcatgctggaaattgtccccgctaaatctgtatagacaacctgatcggcttttttcttaccgcgattgaatttatcaagataactcagaatcttgtctttatccttgaaactggttggataaatcgtaatctgcgtgggtgtttccgaaccgcctaatgccgtgatcaactgatccttagtcgctttgtccacactttgattggtaaagatgttcacgtcactggctcgttgtgccttgacgacatcagagtctttgttcaatgccacaagatcttttgttaaccgatcagaataagcaaacccttggctaagcaagccatcacttgttttcgagcgcgtccgcagaacaccagcaaccgtcagttcgcggttgtcgttttgtttataagcatttgcgtaatctttcgttgggacatagacattgccagcaacattctggtaataggcattattcgagattgccttgatcttagtgccaacaatctggttaaatttcactttttgaccatctttaacatcaaaaccgaggttcttcaaagcattgatgttcgtcgagttgtcccgatcaacaatcagaataacatccccatcatgcttcggataactaccggcaacaacctcataatttttcttcagataactggtgccgccttcgcgatcaaccggataaactgatgaactagcgcttgccaagccacgttgagtttgattactgcttggcttagctgtcgaaaattggactggcttgatggtaccattcacgtcacgtaacagattcataccagtgccataagtgtagccaatgttgtcggttagtttcttgctaatgccattcacataatcaatatacttttgatttaacttattggtgtgctgcgccttatcactagcactttgcttagccacaactgttgaggttgttttaaaagtcgatgtctttgtattgtccgccgctcccgctgttaagctagtggcgttagtcgagatcgtaatcgggaattgcgccaaagtctccgcttgcgtattatcaatctgtttttgaaagcccgaggaaagtgctaaaaccacggcaatgccaataatcccaatactggaagcaaatgccgtcaaaaaagtgcgaccttttttggtcataatattagtaaatgacaatttaagcgccgtgaaataactcattttggtgcgatgcaggtcaaagctggcagtttttttttcatctttgaatggccgtgagtcagaaagaattttgccatccttgaattcaatcgtccgttctgcatattcatgcgccagttgaggattatgcgtgaccatgattaccaaccgctcgcgagataaatcagcgattaagcgcataatttcttcactagtttcggtatctagtgctcccgtcggctcatcggccaatagaatcgacggctccgagacaattgcacgcgcaatcgccacccgttgcatctggccgccggaaagttgattgggttgcttacccatatgtgccttcaaaccgaccttcgtcaaagcagcctcggcctttttacggcggtctgctgctgacacaccactcaaagtcagaccaagttcaacgttttccaaaatactcagatgcataatcagattgtagctttgaaaaataaacccaaccgagttattacgataggcatcccaatcggcttctttaaaatttttggttgatcgcccgtgtaagagcaaatcaccggaatcataacgatcaaggccaccgatcacattcagtaacgtcgttttccccgaaccactgggacccaaaatggcgacaaattcttgttcccggaattgaactgagacatcgtcaagcgctttggtcgtatagtcgcctgtctggtaatattttttaatatgttttaagtctagcaatcgttgttctccccttaatgcgttttctgaaatagaaaatagttgaaacgttcgctcgcaatcgcgatccccaagcgggtgttaacggctaatcactgatcgcacttttctgcctacgccaaatcacgcgttatattaatggtgcctgtttatactttggaatgaaataacttgccatatcttagcatacttatgaactacttgataatcagcccatagtctgaattggtgcgctagtctagaaacgcgctactgtttctcaatgagatgtcacacgcaaactaatcatgccgctaactatcgttgcatttaaacaccaacgatgagtcgataccggtcatgagcaaaaagtggatacgaaaaaaccgagccgggctacctgttcaacaggtttgcggttcggtgaatgcatatgtcagcactgattaagtgggcttcctcagtaacggctgccaataaatcaaatccagactatgatccggatagatgtaataactaatatttaattttgcgaaaggattcgccattgcggcaagataaatgggttgcggagcgtgagccaacccagcgactgcgaccagaatatactttgccatctgctcaaataaaggttgtgtgagcccagtggttagctgaaattccaagtcaacataaatgagttcgcgggtttgtcgagtaagcgtgatgcgatgaatcggcatgccgccaaaattaccttcacgattgagatcatcgaccatgcgcttaatttgtctgtgcttaaactgtggccgcgcaaacatcatgcgccaaactgccatgccgtcatccccttctttgaacgcactcgctggcgcagaaacctgcgtggcacgatctcaatcacgttgagacttcggtttctaaccgcgccagttctagctttgcctctattatgccacaaagaagcgggtgatcggcttaaaaaattgggtcgaggatttttgagaaagctgtatcgatctcagctcgagcagcctgttgttcggctaaaccagcggcaaatcggtcatgatctactttgtcagtgccgattgcttgaagcatgttcaaaacaccgccacgaataccgcgcaaaccattcaccagtactttgtggaaggccgcataattacaaggtgctgcttccgcatccacactgtcaacgaatgtacaaaatttcatcacattcttggtgaagtacaaacgcaaatgatcgagactttcacttgcatagcaatttcctttctcgatgtttttgcacgtgtgcacatattccttaaaaacggtttcaaaaacaagcagtcgttccaagttctggttcacaacttcaacatagtttggttcttggcatcgtgtatgcatttcatagtcccccctagtcttgtgacttcatcaacttacgctcttaattatacccactaatgtcttataatcaatataattattgtctaatatttaaatacctaacgttatataaccctccaaaagcctattattattacgatttgcaaacatgacagcagtctgtgaaaacctttttctttgatattgcacgcaatctattcaattatgaaaacttgttttatttgagttgtgcccccatgtcttgacagacaactaattgtgattttcatgtttcatggccagttgcactgaaaataagataacaaaaatattttttaaatattgacaatttatatcttaatatttgacttccggatgcttgatctgattggcaatttgaattttgcgccattagttgttaattcagtcaatttaaaagaacctttcaacaacgtttcctcgcaagttcgcagaacatcacctataatttaatcaagctgttcggtgttatccatacaaacatgggttacgcactctggcttttgcaagcgcaccgagacggctatctgggaggaacgttatgaaaggttatccaaagcaatatccgcttgatcgacagactttatttgggatcaacactatggggttaatgagcacaacagcttattatttatacacggaagttctgatgatgttcataactgactactcagggatctattcgggtgtacccggcaaagccgctgctgtggcaacgaccctgttatttgttggccggttatgggacgctgttaacgacctctggactggctatctgatcgatatatcgccgcgaacccggtggggaaagtttaaaccatacgtgttaataggcagtttattagccggtattttgggtatgatgctttttcacattccccaaaacttctccaatttcggtaaagaggtttacctctatatcgtttattttctctttatgtttgctgccacgattattgtgacggttccgttgaccagtaccatgtcagccgaccaggaagtgcgtgcaaagttaatttcatggccacggatcaccagcaatattgtcggggtggttttcgccttcttcatggcgatcgcaacgtatctaggaacaaagcgcaaccccaatattcccttaaccgtcgatctgatcgtcataccatttctgattttgtcgttgatcggcattgtcatggtcaaagaaggtccggttaccgaggaggctaagccgccaagattgcgagatattggtcagatgatcaagatcaatcaccctttccgtatcaacttgtactttacctttgtcggtgggtttgtttgggcattactgaccgcaacctcgctttattacatcaagtatgcctttggggtgaaaaatctcggcacacagtccatgtattttggcctgctaaccttgatcacactggtcgcaggcactcttatttctcaaaaagcaatgcagtacatttcggctattcgcggtgttcagtggtgctatctggccatggcaccgtttctagtcatcatgtttatcattaatgaaattcatgtcattgataatccgtgggtcttctacttactcatcggtattgtcatgaccatcgccggagcacagtttgtccctgccaatttaatcattatggaaacaatggactacaaccgactcaaactcaatgctggtatggaagcgactatcaatgccgtgaatatgtttctgcaaaaactacaatcaggactagccacaatcggcgtcggtgctgcactactgatcgttggttacaacgcccaaacgcttgaaaaggcaacgcatgtgccagacaacttgttgcaaagtttaggcgttgtccttttcgctattcctgctgtgttttcttttttagcctatctgattgcccgacattatccattgcaaggtgccgctcgtgatgagatgtacgctgctctagctgctaaacgggtgacgaatacgcagtcatcaaaatctaaatgatgcatcgatcaatcatttaactggcaacactttttcgacctgagcagaagtgacagctttcgacgtgtatcatgctctcaaggagacgatcttcatgaccagaccttcagctgttaatattcatcgcactaatccaccagactggtttaaacaagcggatttcggtatcatcattcactggggaccctatagtgtgccagcttacgcgccagtcaatattcctgattacggcactttaatcaaaaccaaatcattaggttatttgtttgaacatcaaccttatgcggagtggtatggcaacagcatgttattgccaaacagccccgtagcagcctatcaccggacgcattatggcaacacctcttatgcagatttcgcaaaaacgttcaaacagaccgcccagaatgtcgatgtgcaggcctgggccgcagcatttgccaatgctggcgccaaatatgtcgtgatcgttacaaagcaccacgacggttttgtcatgtttgatccgcacaccaataacccgtacgaacctgactatcatttgaacttcgactttgtcggtgaactggcccaagctgttcgcgcccacggaatgcgttttggaacctattattcatctttattggactggactttcccgcatctgccaatcaaagattacggcagctttctattgggcaacgacaaaagccaaacttacaaagattatgtatggcatcagtggcacgaattgattgatcggtatcacccagatgtgctttggagcgatatcggctacccagatgatcaccgcttggaaacgctgttcaagtattattatcaacaagtcccagaaggtttagtgaatgaccgctggcaacaatttcctgattggatgcgaaccagttggatacgacctattttcaatctcgttgcggcgcaggtcattaaacgtgaccaacatcactcagacgatctcagcgaggttaagtactatgactaccgcacccttgaatatcgtactgactggccgcaaacaaatcgttatttcgaaatgacacgcggcatggacaaaagttttggttataaccgcctcagtcggccagaggactatattactgcagatgacatcaagcaattgatcgcagagcttaggtctaaacgcggtcgacttttactcaatgttggtccggatatgaacggccaaataccatctgcccagctcagcattcttcaacagttaagcaataggtagtggcgtatctaaaatcatgcccagtttcctcgtcatgatcatgcaaatcaaaaagcacctgaccgcacaaaaacggtcaggtgctttttcatgtcagtagctgaagccttacccaagttgattaatagctgtccagctagccaacgcttcaggtcggaaaccgccccatgttgccaatacatcacccgtcgcatcgtcgcgaacgcgcacaactggaaaacgatcatatccggcctcacgaaattttacaattttttggtgactccacgcccgttttaacggatcattggcgttaatatcaacaaggtttgattcacctcggtggttcgtcgtacgaaaatgttgaccgtgttctgcgagccagcgtttggtgagccggcatgactcgcagttaggcttttcataaatcacaaaatgaatcgccatacgctgcactcctttgcatgacgctgccatctttttagtgcaatgggctgcgtgtattgaggttagctttactatcccctattttaatcattcatgcaatgcgtatgggtttgttcagggttaaatgacgatggttaccatcctaaaatttgggggtgggtctaccttgctcacattgcggcggcttgttggtcaagggcagcgatgacgtcttcaagcgcacggctggcatcaataggcaaacgatcataaccatcatggtcaacgtctttagtcgcaataaacgccaacctatcttccaaacgttgacggagacgagcgcgataatcgttgtcgccaaaatcaacattaaaaccggataacggcagataccgcatctttggtagcaggccaaatggtttgaaggcagctgtttcgtcaacaatcttggcaatcgcgcctaacgtatcggctggtttcacattttgaccgttgtaagaaccagtattcaaaatataacaagctgtttggcgttgttcaaagagttggtggaaatcttgataatcctcccccaacggatagctgcggaatgggttcgcaaacggttcgatgacaagatgatcacgatcaacatcaccgataacgttttccgctgttgagcgtttggttgccagcgtcacgccaaaagcagcggcaagatcaggatcttccagtttcaccaccggcggcaaggtatcatccttcatgatccagaaaatagcatcgatactctccgtaagatgatccacgcgattcggcgtgacgtaacgtgacttcacggttcgtccattgccgttgcgaatatcctgcgtcaccagtgttttcttaccagcggcatctagggtcactccaacattttgaaccgtcagaaaatactgaatgcccggatcactcaacggataatcctgagttttatcaaaatatgaaggctcaagcgccgttgttgcacccgtttgtcgatcaatcacaaaggcatcgtcatgtaagaccttcacgggatactgatcgccgtgactggccaacgtgatcgttgacttgccggaaccggacaagccaaacgctgccatcgtaaaatcgccgtcctgtcgcgtatattgtttcataccgccatgacaggcgacaaaaccattccgatgcgccgtcgcccacgcaagcgtcaacgtgccttttttcaactcgccaaagtagcgtaagcctaacacgatggcggcattatgcgttggatcaaacacggccaaaccgtttggatacgccggatcatgccaatcgggatcggcataaagataaatgtcatcttctggaagtgggcgcgattgttcatattcagcattgcgttgtggcgtatcaatttgaaaattcagcaagtacgtatacaaattatttgcatacgcctcaggcagcatcaaatgcgccttgatagcaaaatcagaggacaagccaaccgtgacatccccacggagaaaagtcttgcgactccctaaaaagacagcttcccgagcaatcgccgccagtttagtctcatcaacgtcaggctgaccaataatctggcgggcagctgccgtccgaccaactacacggccgtcattagccactaacaccttggcatctggcggcaatcccagttcagccgtatgtttgatcggtaaatccgtgataatcacacccggcgctgttttggctaaagcataggcttgggcgatggtagtaacctgcttcacattctccccgtaaaatgctgtttcaaccgtggccttaagcgctgaaaaatagccgctctgactggtgatgtcactgcttgaaaaactttgcttacttgtcatggttgaatccccctctttgaacgtgctcttcagcccacgctgaatcacgcactatctttttaacaacatggatgtcaaatgaaaatatttgcatggttcaattataccgagacgaagcagcggacgcgagttttaaaaaacccaaactagcgatttgcttcactagtttgggctcgcgcgttgttagctgtgatacgttaaaaaatcatgcgggttaagccttccgccgattgttcgcctgcaccatttttgcatgatcgatcagcgggcatccgacttcttcacattggctacaaccagccttattttttttgaaaaatgtacggtatgctacaaccgcaataattaaaacaacgataccgccaataatccatgttgccatgagctaagactcccttttttaaatgagttgacaagttaaaaacttgcagcaattgccggaaccggccgtttgattagcagcccataaacaatgagcaaaattgcgactaaaactagcccgatgctcatgacactggcttggccggataccacgagactgccttgataaatcaacatcgtgagaagataagccacgccagtttgatagcccacggcacgccatgtccaccgtgcatcaccaaactccttgtacatcgtaccaatcgccgcaaaacatggggcacacagcagattgaaaaccaaaaaggcatatcctgccatcgccggataggtagcgcgcaaagcctgaccaaagccgctagcactgcctgccccaaaactgatatgtaaggtaccgacacaattttccttcgcgatcaaaccggctaaagtggccacggtagcatgccagtcgccaaaacccagcggtgcaaaaaccggtgcaatgatggttcctaacgcgcgcagcatactgtcattttcgtcaaccatctgtaaaccgaaattgaaattagataagaaccacagcaacacgcatgacagaaagataatagtccctgctttctgcacaaaagcgcgtgcccgcgacatgacactgcgatacaagttggttaggcgtggcaagtgataggctggcagctccatcacaaacggcgctggtggaccagcaaataaggctgtttttttaagaaaaatccccgaacagatcacggcaatgatccccatgaaataagcggatggtgccacccaactgttgcttggaaagaacgtgccgctgaccagcgcgatcaccgtcaacttagctgaacagggcataaacgtcgtcaacatgatactcattcgccgatctttttcgctttcaatcgtccgcgtcgccataatcccaggaaccccgcaaccagtcgctattaaaattggaatgaagcttttaccgctcagattaaaccgatgaaacagccgatccatgacgaacgcaatgcgagccatatagccgcagtcttctaaaatacccaaacatagaaaaagcatcataatctgcggcaagaagcccaatacggatccaataccgccaatcagaccatcgacaatcagaccggatagccatggggcaacggcccaacttttcaaggtgccgccgacgacacttggcagccagccaccaaaaaccgtgtcattgagataatcactgccgattgtgccaatggtttgaatcgataaataataaacggcccacatgaccaagacgaatattggcaaagccaaataccgatctgtcacaatgcgatcgattttgtcgctcatcaacatcacaaagtcatctttgtcaaccacacacatcgcaatgacgcgcgcaatgaagtcatagcgggcattcacaataatactatcggttgtatcatcaaacacatgctccgccgtccgtaaaatttcattcatctgatgttgctcgtctgaagaaaaggccaattgcttgaccacttgcggatctttttcaaaaaccttaatggcataccaccgcaaccgatcggcaggcaccttctggtcaatcacatcctcaagcatcgtcagcgccgattcgagtcgcgcatcatactcaggaaaggcataaggctttggtagcggcgcctgaatggtttgcaccaactcctgtaaggcagccggtttagttgctgtcgtggcaatgacaggcacctgtaatgcataactcagcttttttaaattaatcgttcgatggcccgttttgaccagcacatccatcatgtttaaagcgacaattaacggccgcccggtttccataacttgcaacgtcaaataaagattgcgctcaaggttggttgcatccaccacattcaagaccaagtccggttgatcatttagtaaaaagtcgcgcgtcacgatttcttcactgctataaggtgacaatgaataggtacctggaagatcttgaatgactaaggcattatccgctttcagccggccagatttacgctcaactgtcacccctggccagttaccaatatgctgcttagcgccggttaaggcattgaacaacgtggttttcccgctgttaggattgcctaccaatgctaacgtttcacgtatcgccatcgcttgtcacctccgtcaccagcacatgtgccgcatcctgcttgcgaatgctcaatttgtaaccacggaccgctagctcaatcggatcacccaaaggcgcaatctgatgaattttgaccaacgtgcctttggtgagacccatatccattaggcggtgacgcaacggtggatcccctttaatcgtgcggatcaagcctgcctgccgcaatggcagatcagccaaggcaatggcaggggtatcagcatccatggcaaacggtcgaaccacgagtaactaggcaagttcatcgctaattgctaatcgctgaccttgaaaaaaaatcaccatgcctgacaacttgcttgcaggctgaaccacggtcacttttttgcccacgactaagcccatttcggcaagatgccgccgcaaagcgccactgccaccaacgctcatcagtaagtaagcgcccgattcccgtacatctatcaaggcctgcatcgcgctcatcccgctttcgtcaccaattttgtgctactggtagcatagcatgttttcgcacgagcaaggaaaaaaatcaaacaaatgctaatctgacaggccacttttgcatacatggcattgctcataggatttgaaaaagcgtctgtgatcagtctcaagtactgcgcacagacgccaatcgtgactccaattgactttatttaactttcgccaaaaccgcttttgcaacggttgcgacataatgcggctggccctctgtggtcggatgcgttttgtccgctacaaaccaatcatcatggccttctgacgccttgtgccaatcaacaatgtgcagattttgataacgatgactcattgaaacaagatcgcgattaacttcatctgtccaagtcgtatctgcatggacattaatccaatatacctgccgcttgctgccaagagtattcataattgacgcgaactcagcatcggtaaatgtgccattgcttcccaagccgataatcaccgtgtcagcaagcttgcctgaagccgctaatgatttgaacaaatccggtgcttcataaatttgtcgactcacaccagcatcaaaataaatcttcgggaaaagttccttgtataaatattcgctacccagcatgaccgaatcacccactgctgtcacatccagttgcttggccgcttgcacttgattaaaactgaggccgtcagcggcaaagtctttataaactggatctttggccttctcagaagcttgtgttgcctcccgcatctttttagccgaagctcgcgagcgaaccgctgctttagagcttgaagcagaggcggccgccgcctttgcttgtgcctgttgatgaacaccaaaccaaataccgccgcccaataacacaacggccaagatggcaataccccagatgagtccctttttcgattttgtttcctgtctatgcatgccgcaccccttcaaacaattaagttaccgtatgatgatatcatagaaagtagcatgagtgcgcgagcgatagatgtaaagcgtggtggttagttcagtgcttaaccgaagaaatgttgatgacaaacgtctgtcacgaatcagttttgacctcttcacgctgagttaatggcggcatgtcgctcgaatgaagctacacattgaacaaaaaaatccttccagttaataactggaaggactaacgtgttcaacgagtgacgttccacgaagaatcactcatgaaaagatgccggctgcaggagtcgaacctgtgaccctcggtttacgataccgatgctctaccaactgagctaagccggcatactgacccgtacgggatttgaacccatgttaccgccgtgaaagggcggtgtcttaaccacttgaccaacgggccattgctgaacaacaaataagattatacaggagcactatcgcactgtaaagcattttttgatggtaaatgagatcattggcagaatcattttctaagttaaaatgattgtccatctactttttgtaagtgtatcatgaaaaagaaacgaatcgtcatgaaaggatgttgttttagatgaagattgcgattattggtgccacaggacatgcaggttcggctatttttaaggaggccctcaaacgaggccatgaagtgaccggttatgttcgccatccagataaaagtgttggaatcttgccaccggatgcagatctgattcaacaagatgcgttcacgttgacgcgcgagcagttgacgggttatgacgctgttattgatgcttttgcgacaactgttgagcaagcttatctccacattgatctggccgaccacttaattcatgagttacgcaacactgataagccacgtgtgatttttattctcggcgcaggcagtctaaagaatggcgaccagacattgtatgatacactaaaaaaagatccacacgctgctgcttttattaatacaccattgaatcaatttcgggaactgcagttgttacggtggaccgataatgtaaactggcttggtatttcgccaagcgctaactttcagcctggaccagctacagcctacgtacgtggtaaagacgagctgttgaaagatgatagcggcaaatctgtcttaaatagcgacacacttgccgttgccttgctagatgagctcgaaaacccgaccatcaaacaagcacgcttcacagctcgcaatgcttaaccgcaacattttctggacatcacagaggaagggacattttggcacaagtaaaattaaccattcattatgttgatgagaccggcaagtcgcttggacctgagaaccatttaacgaacgcggtgggtcagcgttttcggctaacggcaccaactctgattggctataactttcagaaggctgttctaccagatggcagtgaggttggcgatcctacagtggtcggagtcatgaccaaagatgaacaacaactgatctttatttacagcgcaacagcctctttaacgtcacagccgacaccagcaacattggtgattaaatatgtggatgaacatcaacaagacttacgtgatgtgcaggtcttgcacacaaagacaggtcatcagttcgaactaacggcaccttttttccctggttatcagtaccaccatgcattactgccaggtggcatggtgatgtcagaccagacagtatcgggccgattgattcgcgcacataacgaactcattttctcgtatcgcgttcactcacaaaatcaccccaacaagatttaagatcaaaagccatttcttcgggagtggcttttcttttacataaaagcgcctcttaccttttcacacattcgaggcgcattcttattaaaaaaacctgcaacacaacattcagctttcgaatgattgtgttgcaggttaatcgatgctctgagtcattgtcctgacaagaaactagttaaggcacttgttccaccctgttgttgcagcgttttagcatcttgataagcctgatagtaatcgcctgatgcaatcgcttggcgaattggcgttacagaactctcctgaaaaagcgccgcagcagccatttctgcttgactatgattaacaccagatgccttttgtaaaagtgaagcagcctgatcttgatccttagccgcagccataatcgtactcattttggttgctttcaacgtatcggcagcccgttggatagctgcatcggttgtcgcatcaccagtcttttgagctgtaatgccggaaacgagacgagctttaactgcagaatcaacaggcgtgtcattacccgtcacattacgaaccgtgttattcagttgagggaaaaagaaaacccctgcgataatgagcaagatcaacacacccatgataattgaaaagatcttaagtccacgatgggcgtgctttttattttgttggcgtaattgtaatcgattgtccatgtctgtcacttctttcatttgtgatggctggtacatattatgagagtgatcgtacagcgggtcaagttaaaccagttattcatgactggtccagcctgttcttaatccttgtttaaagacctgcaaataatattaaaaaaagacaccctttgcaggatgtctcatgagctccggttgtcaggctcgaactgacgacaacctgattaacagtcaggtgctctaccaactgagctaaaccggaataaaaaaagcgtggcagcttcctaccctcgcaggcagtttcccaccaactactctcggcgtgaagaagcttaacttctgtgttcggcatgggaacaggtgtatccttcttgctatcgccaccacacttatgagaactttgcgctctcaaaactggctatcattgtttaattgctgccttgaacctaacgtacttgtcatcgaaacgtgttcgcagtcgcagaaacctgcgcctgcttgcacgcttacttggttaagtcctcgaccgattagtactggtccgctccatgcatcgctgcacttccacttccagcctatctacctgatcatctctcaggggtcttacttccatataggaatgggaaatctcatctcgaggggggcttcacacttagatgctttcagcgtttatccctgccgttcatagctacccagcgatgcgcctggcggcacaactggtacaccagcggaacgtccatcccggtcctctcgtactaaggacagctcctctcaaatttcctgcgcccgcgacggatagggaccgaactgtctcacgacgttctgaacccagctcgcgtaccgctttaatgggcgaacagcccaacccttgggaccgactacagccccaggatgcgatgagccgacatcgaggtgccaaacctccccgtcgatgtggactcttgggggagataagcctgttatccccagggtagcttttatccgttgagcgatggcccttccatacggaaccaccggatcactaagcccgactttcgtccctgctcgacttgtcagtctcgcagtcaagctcccttatacctttacactctgcgaatgatttccaaccattctgagggaacctttgggcgcctccgttacattttaggaggcgaccgccccagtcaaactgcctacctgacactgtctcccgccacgattagtggcgcgggttagagtgttcatacagctagggtagtatcccaccaacgcctccatcgaaactagcgttccgatctctacggctcctacctatcctgtacaagcggtacaaacactcaatatcaagctacagtaaagctccatggggtctttccgtcctgtcgcgggtaacccgcatcttcacgggtactataatttcaccgagtctctcgttgagacagtgcccaaatcattacgcctttcgtgcgggtcggaacttacccgacaaggaatttcgctaccttaggaccgttatagttacggccgccgtttactggggcttcaattctgggcttcgcttgcgctaactcatcctcttaaccttccagcaccgggcaggcgtcagcccctatacatcatcttacgatttagcagagacctgtgtttttgataaacagttgtttgggcctattcactgcggctgaccttgcggtcagcaccccttcttccgaagttacggggtcattttgccgagttccttaacgagagttcgctcgctcacctgaggatactctcctcgactacctgtgtcggtttgcggtacgggtagtttatttctcactagaagcttttcttggcagtgtgacatcaggaacttcgctactataatttcgctccccatcacagcttgtccttaagactgcaagcatttcactcgctgtcagacttgctgcttgggcgcacatttccagccgtgcgctttccttagcctcctgcgtccctccatcgcttaaacaaaataaactagtgcaggaatctcaacctgcttgtcatcgactacgcctctcggcctcgccttagatcccgactaaccctgggaggacgagccttccccaggaaaccttagtcatacggtggatcagattctcactgatctttcgctactcatgccggcattctcacttctaagcgctccagccgtcctcacgatcgaccttcaacgcccttagaacgctctcctaccgcgcacccttacgggtgcacccacagtttcggtattatgcttagccccggtatattttcggcgcagtgccactcgactagtgagctattacgcactctttaaatggtggctgcttctgagccaacatcctagttgtctgtgcaacgccacatccttttccacttagcataaatttagggaccttaactggtgatctgggctgttcccctttcgacaatggaccttatcgctcactgtctgactcccggagtaagatcgatggtattcggagtttatctgaattcagtaacccttgatgggcccctagttcaaacagtgctctacctccatgatccatcctccgaggctaaccctaaagctatttcggagagaaccagctatctccaagttcgtttggaatttcaccgctacccacaactcatcccagcatttttcaacatacatgggttcggtcctccagtgtgtttcaccacaccttcaacctggtcatgggtaggtcacttggtttcgggtctacatctgcttactcattcgccctgttcagactcgctttcgctacggctccgacttttcatcttaacctcgcaagcaaacgtaactcgccggttcattctacaaaaggcacgccattacccattaacgggctttgactaattgtaggcacacggtttcaggaactgtttcactccccttccggggtgcttttcacctttccctcacggtactggttcactatcggtcactagggagtatttagccttgggagatggtcctcccggattccgacggaatttcacgtgttccgccgtactcaggatcctggacggagggttcgacgtttcgcttacagggctttcaccttctgtggcgcagctttccagctgacttcgactacgtcggactttggtaactccaatgtccagtcctacaaccccgagaagcaagcttctcggtttgggctcttcccacttcgctcgccgctactatgggaatcgagttttctttctcttcctgcgggtactgagatgtttcagttccccgcgtctgccgccggccagctatgtattcactgacaagcaatacactgatgtgtactgggttcccccattcggaaatctccggatcaaagcttacttatagctccccgaagcatatcggtattagttccgtccttcatcggctcctagtgccaaggcatccaccgtgcgccctttgtaacttaacctgtactgacttgcgtcagcggttatgcgatgcgaatttctttttcagaaactcatacaaatacgctgtgttctcggcaatttaaaacaattaatacaatgatatccagttttcaaagaacaaagtagccgactttcgtcggtcattggcctttcggccaatggaggataacgggatcgaaccgatgacctcctgcttgcaaagcaggcgctctcccagctgagctaatcccccataagggttgttcaattaacaagcgtacgcttgatgggcctagatggacttgaaccatcgacctcacgcttatcaagcgtgcgctctaaccaactgagctataggcccgataggcgtgaagaggttatcctctcaaaactaaacaaagtttcgtgtgtgcaggtttccgtcagactttcagtctgtttccttagaaaggaggtgatccagccgcaggttctcctacggctaccttgttacgacttcaccctaatcatttgtcccaccttagacggctcgctccctaaaagggttacgccaccggcttcgggtgttacaaactctcatggtgtgacgggcggtgtgtacaaggcccgggaacgtattcaccgcggcgtgctgatccgcgattactagcgattccgacttcgtgtaggcgagttgcagcctacagtccgaactgagaatggctttaagagattagcttgacctcgcggtctcgcaactcgttgtaccatccattgtagcacgtgtgtagcccaggtcataaggggcatgatgatttgacgtcatccccaccttcctccggtttgtcaccggcagtcttactagagtgcccaactaaatgctggcaactagtcataagggttgcgctcgttgcgggacttaacccaacatctcacgacacgagctgacgacaaccatgcaccacctgtcattttgcccccgaaggggaaacctgatctctcaggtgatcaaaagatgtcaagacctggtaaggttcttcgcgttgcttcgaattaaaccacatgctccaccgcttgtgcgggcccccgtcaattcctttgagtttcaaccttgcggtcgtactccccaggcggaatgcttaatgcgttagctgcggcactgaagggcggaaaccctccaacacctagcattcatcgtttacggcatggactaccagggtatctaatcctgttcgctacccatgctttcgagcctcagcgtcagttacagaccagacagccgccttcgccactggtgttcttccatatatctacgcatttcaccgctacacatggagttccactgtcctcttctgcactcaagtttcccagtttccgatgcgcttcctcggttaagccgagggctttcacatcagacttaaaaaaccgcctgcgctcgctttacgcccaataaatccggataacgcttgccacctacgtattaccgcggctgctggcacgtagttagccgtggctttctggttggataccgtcacgccgacaacagttactctgccgaccattcttctccaacaacagagttttacgacccgaaagccttcttcactcacgcggcgttgctccatcagacttgcgtccattgtggaagattccctactgctgcctcccgtaggagtttgggccgtgtctcagtcccaatgtggccgatcaacctctcagttcggctacgtatcatcgccttggtgagccgttacctcaccaactagctaatacgccgcgggtccatccaaaagcgatagcttacgccatctttcagccaagaaccatgcggttcttggatctatgcggtattagcatctgtttccaaatgttatcccccacttaagggcaggttacccacgtgttactcacccgtccgccactcgttccatgttgaatctcggtgcaagcaccgatcatcaacgagaactcgttcgacttgcatgtattaggcacgccgccagcgttcatcctgagccaggatcaaactctcatataaatatgagctgttcgaatagctcgatttgttgttctagcgaattgacttcgcaaatgttactttttgcctcggtaccgaagtaccaaggaccctgcacatttaaacgaaactttgttcagttttcaaaggacgaccttgtcaaaagacaactttcatatattatcactagctgttgaaatatgtcaacaactttttgaataaacatgcaaccgatatgaatttcggaatcggttatgaatttgacaacggagaatatattatcaactttacgaacccgcgtcaacactttttaaatgaggttttgctaagaatttaaagtccgaacgtttgcattaaaaaagcagtgaatcatttgcgattcactgcataaagatgcatgaaacaattaatcttccttggtgattgcggtttgtccttgcatgtatggtacaatcacatcaggaattttcacagaaccatcagcttgctgataattttccaaaatagaagctactgttcgccctacagcaagccctgagccattgagcgtgtggacaaactgcaatttgccatcgtcatcacgatagcgaatttgtgcacgacgcgcttggaaatcagtgcaattgctgcagcttgagatctcacgatagcgatcttgcgctggcatccatacttccagatcattcgtcttcgcactggtgaagctagcgtcattacttgccagcgtgatgacatgataaggcaatccgagcttttgcaaaagatcttcggcatcgtgaatcaagttttgaagttgtttccaagagtcttcaggcttgcagaacttgaccatttcgaccttattaaattgatgcatccggatcaagccgcgagtatcgcgaccggcactgccagcttcagaacgaaaagccggtgtaagtgcggtgaaattaactggaagtttttcagcatcaataatgtcattccgataatagttgaccaaaggcacttctgctgttggaatcagagtcagtggttcaccatcattcgtgatcgtataggtcgcatcagtgaactttggaaattgaccagtaccgaacatagaatcattgttaacgaggtatgggggaatgatttcttcatacccttctttttggtgctcatccaagaagaagttatagacggcgcgttcaagacgtgcaccagcacccttatagtaaacaaatctgctaccggcaaccttcgccgcgcgttcaaaatccagaatgcctaatttttcaccaatatcccagtgatgctttggttcaaaatcaaacgttggcatgtttccccatttgtattcttcacgggaatcgtcttcatttaacgacattggcacgtcatcagccggaaagtttggcaatcggacgagaatgtaggttactttttcattcagctgggcgagttctttgtctaaagccgcaatcttttggcctacttcccgcatggccttgatttgatcgtcagcattttccttgttacgtttcataaccgcaatttggcctgaaacatcattgcgcttggctttaagctcttcagtttgaacggtcacctgacgccggcgcgtatccaaagctaataattcatcaatctcttcacctttaatcgcacgtgcagctaacttttccttggcccattccggtttttgccggatcagttttaaatctaacatggtttgtcctcctcatatggtcatgatgcgtctgaaatctcagtgcacacaaaaagccttccatctcgttgggacgaaaggccattccgcggtgccacccaagtttgacgcctatgcgccaccctcaataactgataacggtcagtggccgtgcagttcatcactacccactaaggcgctggaatatggatggctgacagctttcaccaaccgctgtctctcttgatcatccaatagacgcttcagacgtgtttgctattcgttcttaaaattaccgcatttagcactgattaacaagcgcccatagtgtttttattcaaaaataatgggagccagtcctcttggcccaaatgcaagcagctatttgtcttttaataaatgaaccgggcatcttctaaaacctttttatcccaaagttcacggagtaaggcatacagttggccgtagtggtcattgctaacattgatatgccatgggaatatctgtgccttgccggctacttttttgactggcgcaaccgaagtcgtgatgaccaaatcggcatctttcagattagcattgggcgacgctaattcgacaaatgggatagcgtgcaaaaacgctagcaagtcaatatagccggtaatcgtttgttcaacaactggcgcaaccacaattttctttggcggctgaaattggatgagtagttggtgcaagttgcgatacagcgcttcggccaaaacatcaatgtacccgtcaaacgattcgagatgttcttcatccactactttttcaagcgtggctttgatctgagcatagaaagccggatcatctttggtctgctgcatgttggaactgaactcagcgagtaaagttgttgtgaagtcttttttgaacaccagcacgctgacggtgacactcagcatattggctaacaacagattatacgtctcttctggcaactgcagatgtagcttaaagttatatggaaaacacgcaaagaaggcttgaatcaactgataaatttcgggattatagcggttgtaccgttcgatcacacgtcgctcaagcgggccatcactgacaatatacagcggcgcaaaattaaacagaaaatagagcgcatcgctttccccttgttgctgctgctcagataagccatctaaaactggatgtccgtcagtcagcgcttcagcaattggtgaaaacagatttggcattggataccgtaaaatctgtgaatccggatcatgcgtcaacacctgccctgtcaaaatgcgttgatgtgccaccgcaatgtaatagagcaacaattcacgtgtaacgacattcacatcgccgcctttaaaggctttaagaacggcatcaagaatttcgctggcacgctcatgcgtcatattttcaaatggccaatccgccccgttcgttgctaaccaatatgttaaccccaaaaaaattcggatatttaattctgacccaataaacgacaatgtctcatatgaaaattgaaccccactggttttggcgtaaccacgaataggtttcagatgtcgcaaaatggtggctttggaactatcggacgccattaaaaagtcatcaaagttttgatagcgcttatataaaactgcgtccaaaaaacgatatgggttcgactttttcaccagatcatagcgaaattcatcaattggaatggcaaacaacattttagtggacgcatgcttgcgacccagtatctcctccagagagttaaccaacccagtgtaggtattatagacactcccatagttacgattagtaatcgccgcaatttgttttaaattcacatcgccgacaaccgaataatgtgcgtgatcaccagccaactgcgttctcaccggcgtctgcgcaattcgtgccgagataatggcgtgaaacaaattgagcttttcagcatcggacatcgacaaaaagatgtcgtgattggcttccatggactccccacccctaaaatacgattttgtgtcttttattatacgtcatactttgtcaagacgcaggcattcacccctgttacaagtacaagtcgggtctaaaaactataccaaattgttattgttcatttactcggctttagaaaatagcgggtttccctaaagttcaatgtttcactaacaaactgtcatcatttttactttttttgttataattgacgtaggtaggggtgaattgcttttagataagggggtgtaccatgctgtatgaacaaacttttttagatcgcgctgatctgcagaagttccaaatgttcgcagcgatcaaagataccaatgtgcaaacatacacgatcaataccctcagtcagcacctagacctttcctatcagcaagggtataacatcttgcaggaacttttccgcgacttgacagttttaacaaaacatccagaaaaaatgaaacggaaacaaatcagtcttctggtcgatatcgatattacagtggacgattatcatctgtatttgttgcagcacgctatcgccttccaatttgtcgattacattgtgcaagctaatcacccgtccacagacaagttctgtcgtgcccattatatcagccgttccacgttggttcgcaagacgtctgctctccgtaatcttcttaaacggtatcagcttaagttgtcctttagcgacttaggctttgccggtcaggaaagccgcatcagattgttcttgttcgccttctattggattggctaccacggcgtcgattggccattcaaagttttagatgaacaaaaaattgttcaggaatacaccgccttacccagtgccaaaaagaatccggtcgatattcttgaagaagtattgttttgggccatcagccgcgtgcgcataagtggcaaccatttcgttgacggcgcggcgccatttgacaaaattttcgatgagtattcaccttttcaatatccggtttacacgaaagaaatgtttcctgcttacgacacacggtttatgaaaagcgaaaacgacttcttctactttcagcaaaatcgcaccattacatttttaccaactgacgccacgagtgatgcttttatccgctacctaagtgacaaaaaaaccgtgacgacagatttcactaagcgactcttggcttttttgaatgctcatgttcgacctgacagtgatttcgatgtttatcacgaacacgagctagttctgaatctagctcggatcgcgttgaacaatgagtttctgggcggcgatttcatgcacatcgtggattactatcaacctgaagggctgccatacacagagactaagctgtaccataccttgcaaacgttcatcgctggtttgccagacacccctgcctaccgtcgttttcttggtaaaaatgcaggatttttgcgcattattcattatcttttggctccttatttgcgatacttctcagaaacaccagttgtgcaagtgaagctggtttacctaggacatgatctcctcaatcgccgtttggtaaactttctggacgatcttagtgtcgttgatttgttgccagatgatgcgccttgtcaggaagctgacctggtgattaccagtgtcgacaatgaagccgccattagagcagcagcaccatcggatttcaaaggcgaggttgccacttggattattgatgatgacgacagtgctattttccaactttatatgttgattcgccgcctttatctcggcaaaacagcttcagcacgctcatcagaaactggtactttcaagtggtgatagcatcacctaaaaaggcagttcccactcagttcaatgtgtggaaactgcctttttgcatcgttaatttcggtgatctcggtgagcggacagatcaacttggtctaacggaatcatttttgtccgatgcttcactttgtaccagacgaataagacaataaaaagcgggattgacatgtaggaaaccagtaatcgaccccaggcaaaattttgaactgcctgcaaatcctgaccaacgatgacaatgagactcataataatcgccagaattgggccaaccggaaaccattttgcatgatacttgagttcactcagatcgtgtccttgcttcacgaaagcgcgccgaaagcgaaaatgtgagacagcaatgcctaaccatgcaagaaatccagtcaaaccagaagctgcaaccagtagttgatagacatgcggtcccataatgctggttaaaaaggtgaaagcaccaaccaaggttgttaacagcagtgccgcaactggaatcccccggttattcgttttctggaaaacgcgcggcgcaaaaccggaaccacccattgcccacaacatgcgggtcgaggcatacatccctgagttagccgaggacaaaaccgatgtcaagatgaccgcgttcatgacactggccgctcctgctaacccaatgcgatcaaataccaaagtgaatggcgaaatcgcaacttgatcgacactcgcacctaataaattcgggctggtatagggaatgatggcagcaatgatcgcaatagataaaatataaaagagcaaaattcgccaaaacacctgtttaatcgctttaggaatactcgtttccggcgtggcactttctcccgcggtaatgccaatcagttcagtcccttgaaaagaaaaaccagcaacgacgaaaacggctagggtagctggcaacccaccaacaaatggcgccgctccggttgtgtaatttttcaaaccaatcgggccattgccgcccatgatcccaacgatggtcaatagaccaacaacgagaaagaccagcactgtgacaattttgactaatgaaagccaatactcagtttcaccaaaggacttaacagaaataatgttgatgacaaaaatcaacgctaagaaccccattgaaatcagccatccaggcacatctggcagccaaaaatgcatcacgattgcggtggtggacacatcaacggccaccgtgattgcccaattaaaccaataattccaaccaagtgcgaacccaaatgccggatcaacaaatcggctagcatactcggagaacgaccccgaaacgggaacataggtagccatttcaccaagactggtcattaggaaaaagaccatcaacccgatgccgacatacgcagcaatggccccgcctggtccagcggtggcaatcgcactcccactggcaacaaagagaccagtgccaatgctgccgcctaaggcaatcatggagagatggcgagttttgagttcacgtttgacttgatttgattctgactgtgccaatagtttgctcctttgaagtttttgataggttgagaatgcgaggctcggggagtgaggttagctttctataacgcacgaaccagcccagaaacctgcgcataaggaccttggacgcaatggtcaaaacccggccgcccgtttagatttaaggcatctttcgactggcggccgtaactgatactgtgctagctttctataacgcgctcgcagtcgcagaaacctacacataaggacgtcggccctaacggctggcccgtttagattctcacagcatttttcgactgagtggctcataatcggctcttgggtagctttctataacgcgcgaaccagcccagaaacctacacataaggaccttggacgcaatggtcaaaacccggccgcccgtttagatttaaggcatctttcgactggcggccgtaactgatactgtgctagctttctataacgcgctcgcagtcgcagaaacctacacataaggactttgagcctaaatggccaaagcccggccatttaggttcaaggccacttatgttccggtttctaagcgctcctgctcgcgctcacaaaaaaagccaacgggcgagaatcaacccatcagcttatcatttttcttgcaatgactaaacgtgatccgattcattagcgccccgcgatgttcgcgacagtccagcggatgttgtccaactggcccaatgtcggatttctgaacaaatccggcatttcggcatccaccccttttgcaaccgcgcatctggcgttcaggccattgcggttaggattcatgacagatgcaacctctaatcgttattggtttacacgttaacatgttcggccttcaacagcaactgcctctcacaaggctttaactcaattctcagccttgcgaatatcggctaccagtgttgccgtgtcaaatttttgctttaaaaaagcatcgttggttgtcggcagatgtagctggaagtcactaaacttttgcagaaacaattcgccactgtcgagttcgaagccaagaatatggccacccatgtgatgatcagcgtcaagaaaatgcaagtggaaccccggtgacaccgcacccgcatagagatcaggcgaataatacccaatcaatgtacccttgatattctcagcgttgaattctttttgacctgaagctgtttcagtaagcgttggatacggtggctgttgtggcaaaaccgcgcgtgtatgcatctgcgtaaaccgcccctcaacgcgtactgcagcaaaaagattggccgtttgaaggcgttccaaaaccgttttttgaaagcctgacaaatcaagtccttgtagtttgcctacagatttatcagcttgataatgcacgtttgcaaacggtacttcttcttctgacccgacttcgcgaacagcgccttgtgcattgacttgataaactttgctatcaatgatcacaagttcgccatctagccccgtcaaagtgccaataccagtattgccatgctgcagcagttcttcaatcttttgcgtaccagcaaacaatccgggtacaagcattgccaatgtgccatgttgatataaccgatcagtattcacagatggtctcctcctattacgcgatcgccaagcgcaatgctgacgaatgaacaaaagcttagtaaatttggtcaggaagcatcgccgcgccaagctccgcattatcagaataatcaactggaatatcaactaaaactgggcctggtgtagcaaacgcctcatccaaaacctgccctaattcacttggtttattgacccgcagtccctttgctccaaatgcttctgcatacttcacaaagtcaaccggaccaaagtcaacgccagctgcacgaccgtacttcatttcctcttgaaattttaccatatcataatggccatcattccaaataatatgcactaagtctgcatgcaagcgcactgctgtttctaattcctgtccggaaaagagaaagccgccatcaccagaaactgagaccgccttttttcctgggcgaaccaacgttgcagcaatcgcccatggtaaggcgacaccgagcgtttgcatcccattggaaaacagcaaatgccgcggttcataacttctgaagtgccgagccatccatatataatgactcccaacgtcaacagcaacggtcatttcatccgtgacccgctcctgtaaggcggcaacaatgctgagcggatgaagcactttttgatcagcaattgccggtggtacatcgctatcctgcagttttgcctgaaggtcttctaaatagcgcttgctgccaggtgcaacttgatagccacgtaacaatggcaccaaaatatctaacgtttgcgaaatatcaccaatgagttcagtttccggctggaagttatgatcaatctcagctggaacatcatcaataacaatgatgcgcgccttgccatccgcattccagttacgtggttcatattcaacgggatcgtacccaatagcaatgaccaaatcactatgttgtaacaacatgtcacctggttgattgcggaacaggccaacccggccgaagaagttgtcaatctgacggtgagaaatgatgccagcaccttggaaagtttccacaacaggtagttccgttactgaaagtaattcgcgaatctctgctgttacatcacttgacgatgcccgcattcctaacaacaacactggcaatgacgcttccttgatggcgtgcgccagatacgtcatatcactgggactagccggtccaagttttggtgcgaccagtggttttatcggttccgagttgactggcgaatctgtgacatcttgcggaatagaaacaaaacttgcgccttgcttgccagattcagccgcttgatacgcgttcgcaattatttcactcacgttatcggggtcctgaacttcagccgcatatttggtgatcggggcaaaaagatcggcgttacgcatgctttgatgagaacttcgcagcaaatcagcgcgtttgacctgaccggataaagccaaaaccggatcaccttcagccgttgcggttaccaagccggttgccaagtttgatgctcccggtcctgaagttgtcagaacaacccctggtttgccggtcaaacgaccgatgccagcggccataaacgccgcattttgttcatgtcgcgcaacgattagctgcggactcttttctgatttaggatgctccagactttcaaaaacccgatcaattttggctccaggaatcccaaaaacatagtcaatgccgtgattcgttaaactttcgacgatcaaatccgcgccatagcgcttctcttctgccattttgccacttcctcctgattgatgtgtttcatattacgcttattgtgtttcgattcaaccctatttttattgaaaaacagcaattaaacagcaaattgctgttacattatttccataaatctgtttcattccattgacaatgcggcgttcttttcttacgaatggtttgctaacgccatcatgccacaaaagttgatcacgacccaatagtttgcctagtcttcgctgagccgcaacacattagttaaaaaaaacaccgcctctaaaagacgatgttcattaaatacactgcataagctggataaacagatcattgcatcttacgactgattttgccaataccagtctgcggatcagtcagtttaattgtaaaaccaaatttagtgaaaatatgccgcagctttgtcaaattaaccttgtcaaacgaactaatcgtaccgtcgacttgggcaatgtcagctttcgttgccaaattaatgaaagctttcaaagcaagctgggccaagcccatattttcaaaatcgtagaaagcgagccggctctccgacccaagggtctccaagacagtgatgtgcatgccgttatcccaacgattggtttcaaacaaaagttgtgactgataatccgctttggaatggccatatttatcaacattttcaaaaggcgtataaacgtaaattgaatttgttttttgcttttgctcatcgaatttaaaatcagtaaacacaatatattggcttacctttttttgggctgcgtcctgcggttgattcatgctagacagcacggttagccgtggatctgcctcgatcgctgcaagccgcttgttatacgcttgctgatactctgtttgcacagtcatcttgaaacctccagactattactcgttttcattataacatttttcaaaccgatgcctatctaaaagagaaaaaccgggatgaattcacccggctttcataaaatagctatagtaatttctcatttttcaaactgattggggagtaatcggtagtatcgctcattgcgcggttgatcaggtgtcaacccacgagggagcggcacttcgaactgaaaatcaaagccgagacgctgtaacaagttgatagaagcgatattttctggaaagacacctgcccagacggcttgaatgccgttatgaaattgatcatcgatcaccagtcgcaagccttcggtcatgaaaccacgatgccaaaaatggggatgcaggatatagccgatttcccgcgtcatatcatccccggtcaaaggcgataaatcacgcggatagacgccgatgttgccgacaacatgctgccgatacaccaatgccaaatcctgcttttcacgggcaaatcgtcgaatgtgttctaaggcggctgcttgtgactttaagggggtcatgccagctggtaatgtggcttgttttaaatgtgcataggcgaaataatcctcaacgtcagtcaattcaaatggccggacagcgactcgcgatcctttcagcatcagcagctcctttcagactaacggtctcatgaattggaaagatttttctactttgtgagatcgtcgcagcttttttttggtttcttcgccatattttaaagtgactaaactatttttcttttcatattatcgagtattcgcaaccagataacaagccctagctcctttcatgatgcgtccatcacaagcttccaacgctttgtttattgaaataatcggtaaaataaagttgttatcttgtgactgtccgttatcgccgactatattgaatgcagtttaagctagtgaccaacacttggactgggattttttataagaaaggaggacgcaccgaccagaaatgaaacgcacatatgtcaagttgatgaaacgacttaaaacaatcgaatccgaaaactagcgaccttattcatgcttatattttcgccagatgtggtgatcttcttcatgcttatattttcgccagatgtggtgatcttcattaaaatggctgcactggtgtgtcggttcatcaccatcaacctgagcaattcaacctgcagatagtcactgacaactatctgctacataaagttggataaaaacatccaccgataccgcttcgacgacggtattagcggtctgtggagggtttgtcatgaaaagaatcgctttgtttgcactaatggtgctagtcatcagtccatttctcattgcagcagggcaaaagactaccgcaacaacaccagagtttgctgttacgcctgtgctgccaagtaatcaaaaacaggcagacgcaggctattttgacttgcaggtcgatcctggccaacaagaaaatttgcaacttcgcatcagcaacctatctgatcaggtgcaaacttatacaattgccgtgaaccctgcttataccaccgatagcggtgccatcgcctttgatcgcgctatgccgcctttgaaccaagatgcacgccgtttgaatacgctcattagcgggccggaaaaagtcagtgtaccagccaaaacagaaaaattggtcacttatatattaaaagcaccgagccagcattttattggcgttatttctggcggtttctatgtgtctcctgaaaatgactccagcaccaacaagtcggtaagcggcgttcgcttcacaaatcgttttgctatcgggatcaccactattttgcgccaagatttcaagacgcctaatccgccactactggcaatgacaaaagcaggcattggtacgattaaccactatgccgccgtccaagcaaccatcagcaatccttctggcaatcagttcggtgacatcacgagtgactatgccttaagcaaaacaggaacaaaaaaggccttgataaccggtcattttgtggggcaagccgtcgctccgcactcatttttcacccaaagcatcctgctcaatgaccgcaaactcatggctggtgactattccctcaaatggacagctaaatcaggcgacttttcttggacaaaaacacttgcctttcactatagcggtcatttaccaaaaaacaccctacaacctgttgtcaacaaaccaaagacaaaagcacctgacaatccacaactgccttggatcattactggtatcgccattgcgcttctcctcatcttgaccggtacatggggctggagcacttggcatcggcggcataaccagtagaaaaacgtgctgcctgctcacgattggcttatgataaagggagagcgtgaactgatgcggttagaaaccggaacataagtgggctgggacgcgatgactgcactttggtcattgtggccaaggtccttatgaggaggttcctgcgccagtgatcgcgtttaaaaagagcgtgaattggcgcggttagaaaccggcatataagtggcctcaaatgcaatgatgcgccgccatggtcattgtgctcgaggtccttgtgagacggtttaggcgtcagtgagcacgtttaaaggaggacttcccatgtcaaacaatcgcatgctcggaaatgagtttcaaacagcatatgaaagtgctggcggaacggatattttaaaatttttagcgaatgtcaagcaggcattccagtgcattacggatttaactgcacgaatcactggtatgcccgattcggttaaaagtgagtctgtctctcagttattagttcaacaattggatcagacaaccttcgccgaaagtgccgtgcgtcaatgggaagacgatttgcatcgctttgctgcttatctcacaccactagaaccacctatcgcaattcttgatagttgggatacattaaatgactttttggaagcgaatcaagcattgttgagttcattgcaaaatgtgcctctattgacccaagaaactcaagaagtcaaaacaacatcgcagttgttcgtctatccagcagaacccctattccaagtcgttcaggccgacactggcgaaagcgactcaattgatttggccggtttggcagatgctgatcctgaaggtgtcgctgaaattgcgcagaatcacggtgttacaccttttgcagcgtttaatgcccagccttgattttaggctgtcaatcctgtatgcttgacaggttaaattatgaaaaagtgaggtgctaaaacatgcggaataacatcatcttaggcaacaatgaaaccggcgaacggatctatttgacttccaagaacaagcggaatacacctgatcgtttgcaactcaagaagtattcaccgaagctgcgcaagcgcgtggttttcaccgaagttaagtaattattcaataacttcatcagtctatatcgcctcctatcagtgtttatcattggtgggacgcgatattttttgtctttttatgactgctgatgagccaccactggcacaacattattattaacatgagcaagttattaggctggccattcttcaacatgctaaagttacttatagtaagtgtgtgacgctgtcctcaaacaagaaaggttgattcctatgacatttgttttgccagatttaccttttgactacgcagctcttgaaccttacattgacgcaacaacgatgcaccttcaccatgacaagcatcatcagacatacattgataaacttaatgccagtttagatggtgtccctcaggcggccggcaaatccattgagcaactattgacagggcttgatgcgctgccagaaagcgtgcgcgtttccgtccggaacaatggcggcggacactataatcactcattgttttggacgatgctgagtcctgaaagcaccatcaaaccggacggccaattattagcagatcttgaaagtaccttcgattcatttgacaagttcaaagccgaattcagtcaagcagctttatctgtttttggatcaggttgggcctggcttgtcaaagacaacgcgaccttaaaaattgtgacgacagcaaatcaagattcaccaatcacgtatcatcagtacccgctgctaggcttggatgtctgggagcacgcgtattacttgcattatcaaaatcgccgaccagaatatgtggacgccttcttcaaggtcatcaactggcagacggttgaaaatcgcctgatgcatcccgatacaaacgcctgacgatgtttggtcactaactttactaaaagccgaagtgcaaacacattttgcacttcggctttttttcatgtcttcgtctgaatctactgcacgtcatactaggtcagattgttggctcaatttggggtgcttctgtcagcagttggttaaacaaagccggcaccggcaattcagccgtaatccgcttttccgaaaaaggatccgtaaatttcaaccgcgtcgcctgcaaggcttgatacggtattcgcgcatctggctgaccataaaggtgatcgccaattaatggatgacctaaacttgcaaaatgaacgcgaatttgatgtgtccgaccggtcagcaactggacatcaaccaaagtattggttttttcttttaaaacccggtattttgtcagcgccgtctggccatcagctgccacaattcggtgaatgccatccgccgctaatttcagaggtgcatcaatttcaccttttggggatggcaatttaccgctgacaaccgccaagtaatgcttcgtcagtgtgcgttgatgtgcttgatcaaaccgaccttgtgcgtatggatgttttgcagccagcaccagtccgacagtatcgcgatcaagtcgagtcatgatggctggttgtggtgcgtcaattttttgctcaaccaaatagcccgcaatacgattcaataaactcgaattcggtgtgtggggtccgggaacgcttgtcaatccagctggttttgagacaattagccaattagcatcttcataaatgacttctaaaggcgcaaactctggcgtcagcgttttgctagtcggaatttcaaagcggataatctggccagcttcaaccggaccattgccagatgcttgcccatcaacccagatcaaatgatctgccagcatttttttgaacaagcgatgactgacaccttgctctgctagccaacgtttgaccgttgtcgaccgtgtcacctttgacgtaaatgaatatcgcatacctatttcctttcgccatccctcttccgcacttaaaaccgaacgaatcggaatccatatttgcatttaaacgggttttgggactatggttagactatggttaatgtacaagaataaggaggaacaggcaaatatgcaagtggaaaaagacgtgatctacgatagcgcctataatttagccgccgatctctatgtacctgacgaagccaatggcggtgccatcgtgtatgcacacggcggtggctggtttcgcggcgataaggaaaatgaaagcgatttaggtaaatattttgccgatgccggctatctatttgcgattccgaactttcgcttagcccctaaatatttatatccaacagcacaaaacgatttcgatcatttcattaattggttacttgcttccccttacgattttgatcgtgagcgtttgggacttttgggggcaagttcaggcggcaccatggttctgcaaaacagtttagcttccggctatccgctcgttgcatggtcccctgttgttgattttgccaactgggttcaaaaaaatcaaatggtaaaggcttctgtggatgggaaaaaagaacttggtcttaccgagatccacgaaattcatgattcattttacaagtatttcgtgcagacttaccttggcggcttagacccgcgtttgttgaccgcggtcaatcccaccaaccatttaaccgatcaattaggtccggcattgttgttcaattcagctgatgaattgatgccactgccaagtgccttgcactttttacaacaagctgccatgtttggtcgcgatatcggactgcatgttgtacccggaaccggtcatgcccgcgactacacaagttttgccttgccagaaaccaagcgcttttttgatcatcacttgtttacgacggttgaagacaaaacgttgaacaaagcgacagactgagcttaacaacaaattcggtcagtaaaatagcgttgcgatcaaccttcattccgaatggtgatcgcaacgctatttttatgcgtcaattttaacaaacatcaaccgtcaccggctgcaaaggtcggttcacggttatcttaagtaaagaacttcatgcgtgatgcagaatcaatggcgatgcgacaccgggtgcgacccattcaaggccaccactaactggcaccaaataaatggcatcagcgccgacatctgtcgggatcaagacaaaaccattgccttctggcgttaccttatagccggtttttgttgttacgccagcctgaacaacggtcagctggtctgccgtaattgtcagcgtcacgtgctcattctgccatgtgccgagataaaccggtgcagtgttgctgacatcctcagctttgaccgaagaagttgcttgagtcgtacttgctgtcgaagctgtctcggtgtgcacagtcgcaaccgtgctcgaacggctgatctcttcagaaggttgtgttgttgccgctgaggaatttgttacagcgactgtcgaagaggcggtcgcattctcttttttaggttttactgttgcagctggttgctttttaggcgttgtgacagtgactgtttttgtgtcagtcccggcatttgcctgatgctgataaagagcagcaccggaaaccccactgaaggtcaaaatcgctgttgccaacaaaaaccactttttcatgtcattcactcccaaccagacatactgtcgtcgacaggtccgtttttcttattatctctagcctatcatgctgcctaatcaaatgttacaaaacgatgtcaacacaagcaaatcttaataattgcggcattctcgctgtcatctttttgtaacatttaaaaagcggtggtttcctcttgttggagcaaacatatgttcgtataatcgatttgaggtgatcatcatgacttatgaagaaaaaatcggcaccgaaagattcgatgccatggtggcggattttttcgcaaatcgttactttgatcgcggcatgcgtaaatggcaaggctactatctttctgatcatacagccgctttaaagaagcaatctaaaagtgaagcgctggtttatcccccgctgccccttcaggatcaagcggtcattcgcgcaatcttgctacaagcctatgcagaaggccaaacagtaacagcccagcttaacctgcaaacgcctagtggtcagatgctgccaccgattcgcggcaaggttggcggtttaactgacagtgacgtggttaatattgcggatcaaaatatggcaatcggatcaattcggcacatcgaactcatcccatttgctgcatcaacgcatcaaaaaaatacgccagactaaggtagtcggccgtaccgccggggctcaaatttcgtgcaatcatttcggcgtttaaagcgcgcaacccattaggtagccgggacgccggtacatgtaacaacgctttggccgcatcctgaacaaaccgtaacccagctggccccccacgatgcaacacattagcgtcttcaacttgtgccatcagatgaaccatcagctgcagatagcgcagatcgccgcgtgtcgtggtttgccgtaagtaaggcaggataaccgtccggatcgtcgggtagccggctaacgcctcaccacgcacgccagtcacaccatgcttcatatacaacgcctcgccatgactcaactgttttttttcactgagatcgcgaaaatcgccgctcacgccttgtgcaatttgcgccactgccggaaaaagcggggcaaaatcatgcatgactaactgcttaagactttgcttttgcaacaaccatcccaaagcacccagtaaaaacccaaaagaaaaattagccccgcgatgcgtattcacacctactgtaactgtcatcatcgctttttcagcctttaccccgatcgtccgcaattgctggtacaactgtggtaccgttgccgccgttaatccagcatgcagatactgaccaaaataaggagccagcgcatgaatgctggcctcaaaggtggtgacgttcatatcgcgatgagcgccattggactccggatcaactaagcccggcttcggcgcaagcaaaacctctgcccgcagactcgtgaccgctgcttgggcgattgtttgttcattcaatgttctttgccttcataactttcagaatatattgcaatgagtggcccaaatgttcacgcgtgatcagtttgatttgatcatcatcgcggtttaacatcccccgataaatcagccaatgttcctgaatcgcaagattacgccgatcatccccgttaatactgatatcacgaaaatagatcaagtaattttgtaattggttgacaatcattttcagccgcaacatatggctggcatcgtaaataaaattattaaactcggtaaatttggccatgacttcaggcacccgtccagcatcattcaaccgatccgtttcttccagaagcgcacgcatctgtttaaattgagccggcgtcattagccgcattgccttacgtgttgctaaaacatctaattccttgcgaatatcaaaaatctcgtaggcatcgttgatcgaaatgcccttcacaatgacaccgataccggttttacgttcgaccagatcttcttcatctaatcgttcaagcgcataccgaatcggtgtccgactgatattgagattctcggacaaattcttttcgttaatacgctcgccgctgggtatttcccctaacaaaatcgtcttgcgaagcgcttcgtacaccgcctctttaatcggccgattctccgaaagatccagattccttttgactgctggcaccacttgattcatcggtcgttccccctcgcttcgtggcctattatagcaaaaaagccgttaacgggggtgttaacggcttaaaggaaatgaagctaggaacaactggcaactagtgtagcaggctcacgcaacgacggtcaacatcagatcaatcatgcgtcggctcaaaacttagcgacaccttctgctccggcacatcataaaacggatcttcgcgtcggccaagaaaatctttagcttgatctgggaacaaagcatagcttaagacatcctcttcgtcgtgcgcatattgcgcaatcgcttgacggaattcaggcatttgcggcttgattaaatccgcgggacgttgtgtgacaaccgatgcatcaccaatgatctttttcaccatttcgggtgcaattgccactggcggccgaccataaaggccgcgcacgtaatccttaatttcatttggaatcaacttataacgctcaccgctcatgacattcatcaaactttgtgtgcccaccatctgcgacagcggtgtaaccaacggcggatagcctaagtcagctcggacacgcggcacttccttcaaaacatcgccataaagcgcttcttgtccttgatcttttagttgcgccaacaggttagacaacatcccgcctggcacctgatagatcaaggatttaggctcaacatctttcacgcgcggattcagttgaccggactcgcggaatcgatcgcgaatcggcgcaaagtaagtggcgatgtcactgaccgtgcttaaatcaacatcagtcggatagccaagatcttgcaacgcaaccagcatggattctgttgctggctgactggtgccgccagcaaatggcgaaaccgcggtatcaatgatatcagcaccggcacgaactgcttccagataggtcatctcagccataccagcggtggcgtgcgtatgcacttccagtggcacgctgatttcctgtttaatgccggtaaccagatcaaacgccttctgtggggttaaaatgcctgccatgtctttgattgcaatcgaatccgcacccatgtcagccatgtctttggctaacttgatgaagtaatcgatcgtatggaaatcactggttgtgtaacaaatagcaagttgggcatgcccgcctgcttgcttcgtcgcttcaagcgccgttcgcaagttgcgtgtatcattcaacgcatcgaaaatacgaatgatatcaatcccgttttcaactgactttgtgacaaagtcagtgaccacatcgtcggcatagttcttgtaacctaacaaattttgcccgcgcaagagcatttgcaatttggtgtgcttgaccgccttacgaatcttgcgcaaccgttcccacggatcttcattcagataacggagacaggcatcaaaagttgccccgccccacatttccaaagatgcatagccgacagcatccattttatcgagaatcggcaaaatatcactgagcggcatccgcgtggcaatcaggctttgttgcccgtcacgcaaaacggtttccatgaattggactttctgtttaggcatggggtgtcctccttttaaaacgcattcactggcccagaaacctttgtgtaaggaccacaagtgcaatggccaaagcccggccatcacacttgtgcccacttatgctccggtttctaagcggtctggctcgcgctctcttttacgattgtttccaccacttgttgtacctctggcaaaccgtgccgccgtgatcgggcacaggccttggcgtcgccgccgcaaaccagacaggcacgtggtggcaaggcaagatccgtgcgagaaacttgatacagttccgcatcgcgtaacgtgataacatcaagatccagcaggtcacagaaccgttgctgattttcaaacgcgaccatgagccgcttgagtgacaaaggtgacaacgtggtcaaaaaataagcttccggtccagttggcaataagtcaatgtccgaagatcgaacggcctcgccaagttgctgcgtcaaggtctgcatgaccgccgaaaaaacggcttcaattcgagtaccggttttaaccggtccaggaatgcgcaaagtcacgtgcaagagcgtattggttggtgcagtcaccaacaacgctcgctctttaaccacgcgagcatctttggcagccagcatttgaccaagatcaacttgtggaccatctaaaatggttaatttaaacattgtgaaccacatcaatcaaggtgccatcacgatattcgatcaaagcgaccactttatcgccatactcgatggcttccggtgtaccagtaatttgataggccatctttttcagatcttcaattgaaaacagcggcactttcagatttttaaacatttcaatcaaatcagtccgtgctggattaatagcgacgccgacttcggtcacgacaacgtcaacactggcacccggtgtcacaacagtattgacattttcaacaatcgttgggatccgaccgcgaaccagtggcgcaatcaccatgctcattttgcaggcagcacttgtgtcactatggccaccagaagcgccacggataatgccgtcagaacccgtgatcacgttaacgttaaagttagtatcaatttccagtgccgataaaatcgcaatatctaactgattgataactgcacctttgcttaacggtgacgcgtacatattagcatcaatctcgtaatgatctgcgttctcgcctaatgaaaccgcagagggatggtcaaagtcctgcacatcgataatcttttcgacaaggccttccttcaacaattcaaccattgaattggtaatgccacccaaagcaaaactagctttgatgtcttgatccaacatcgcttgccgcagaaaacgtgcaacagccagcgaagagccgccagtaccggtctggaatgagaacccatttttgaagtaggccgatttggtaatgacctctgccgcatactccgcaatttttaattccttcgggttcttcgtgaaacgggtcgcacctttggcaatcccagttggatcgccaatcgcatcaacttgcacgacatagtcaacgtcggtttgcggaatgctgattggcgtattcggatatggcattaaactgtcagtaatggcaacaacttgatccgcatatttcgcgtcaatcatggcataacctaacgagccacaggtcgccttaccttttgtgccgttaatgttgccgtactcatcactgctaggggcaccaagaaaggcaacgtcaatatgaatatcgccacgagcaatggctcgggcccggccaccatgtgagcgaatcacaactggattcttcatgatgccgcttgaaattgctgcccccactttgtcgcgcaagccggaactggtgatgttggtcaccacaccgtttttgatgtgctcaatcaatggttcatgtacattggcaatcgaacttggcgcaattgacaggttcttgatccccattttggcaatctcagctaggaccatgttcatcacatagtccccttcacgaaaatgatggtgaaaagaaatggtcatgccgtccttcagcccagttgctacaatggcatcgtgaattgacgccacgagtttgctgtgatccggcttaaccgggttgatgtggcgggcatgttcatcataaggcttaatgttggcaaactcgccgccataaacaccgtattgatccgcatatggttctgggatatcacggttgagtgtattcttgaccatcagtctacctccattcctgatgcctttgcgagcgcgatggtatactgtgcccgttcgacaactggcttatcaaccatctgcccgttcacagaaacaacccccgcgcccttagcttcggcttctttcaagccagcaacaatctcacgtgctttttgaacttccgccaaagcaggggcaaaaaccccattaatgactggaatttgccgtggattgatgacggacttgccatcaaagccaagctgtttgattaaggcggtttcgtggcgcaaaccttcttcgttgtccacttgtgtatagaccgtatcaatcgccgcgatgccagcttctcgcgcagcatgcaggatatagttacgggcaaaagacaattcagcgccatccgtcgagcggtgggtatgttgactcgtcagataatcttctgcacccagcgcaatcccaatcatacgtgatgaagcttgtgcgatttcgcgagcattcaaaaccccttcagccgactcaattgcagccatcatgtgcgtggtgccattttgaatgccgtacttctcttcaactgctgtgatgacagcatcaacatcaataatgtcttgagcagtttcggtctttggcagacgcaccacattaatgccgccaagaaccatcgcttcaatatcttgatccccgcctgcatctaacgcatttacccgcacaactgtttccacgctactgtaatcaaaggtcttcagggctgaataaaccagcattcgcgccgtgtctttttccttcaaagaaacagcatcttcaaggtcaaacatgatcgcatcagcaccataaatcggagcatcacgtaacatgcccggattggcaccaggcacaaacatcatggttcttcttaatttatccatgcgttgatctcctcccagtcaaacgtcttattgtcagacgcacgataaacagcggcgatcgtccgcgccttgatggtacaatccaaggcgcctttgtcattcgcgtcaacggcaacattttcgatccctaacttggccaaggtggcctcaatgactgatcgaatttgatgaccaaactgtttttctacactgctttgcagttgaatggcgaccccactggtagccggtgacaaggtgatttgaatatcacttgattccagcgtaccagcagtcgcaggatgcttaatttccatgtgtcgatcgctcctttatttcttgataaacttctggataaaccaattgctgcacggttttccaatcttgttgtgccattgccgcgcgaacacgggtagcactaacaacatcgccgtcaatcatgagccgcggcacgacgatcagttcaatcgccgaaccaaatgttgccgctagttcccgattgtaaatggccgttaccggcgacagcggttcctcaccgacatagcgacgagtaatccccaatacgggtgcaattgcttgtttaaaaagcgcggcatccagccgagcttggacagcagccacatcggcatctgcccgttctttgagaaaataactcggaaaagtagtatttgagaccatatagtcgttggttggcaacaccacgacgtttggccagcgagcggcaacttttctaactagcgccaaccgttcatcggctgtgaacagagaccgttccgctgataggacgaaaacgtaaacgaccgggttgactttggccgctgtctcaatcagataggcatggccacgcgtaatcggattggcattcatgacaatcgctgccgctggtttttctggccgccgctgcttttctaacgaagcaacataatcggtcaagttgggataaccgcgttcaagtaacacaacagcatcggttgctgccagttgcttgaagcccaatgacaggaaaaatttaacggtggtcggtttggtatagacaaagctatgggtcacaccatcatcgtcaagccgatccagtaatgcctgaattacctgtgccaacaagttttcatgctgggttgctggtgtaactgccacttccttgatgatgttaccggaaagcgaaccagttgccagtaacgtttctccttcaaaaataccaactgtatagtcaacctgacgatccgcagctaacccggcagtcgtcagcaaggcttgccatgctgctgcttcttgcggattcaatgccagccaaattcgttttaaagttgccatgttacttcgccgcttttttagctggggcaaatttcagtaataacttcgccacgatataaataatgaataatacgatgaaaacgccgcccataccgatcagcatcaattcacccgcttgttcaacggcaactgggtcaattttcatggaagtacctccctttttaacgtgctcaccagcgcaataacctgcgtgggtctaaacgcgatctccagcccagaaacctgcacataaggacctcaagccaaactggccaagacccagccagtttggcttgaggccacttatgctccggtttctaaccgggctggctcacgctcttatgcgccaaagaatgatagtaacagtccgccggcaatgacagagccgatttggccggaaacattagcgccaacggcatacatcaaaacaaaattctgtggatcttcatcggttgccattttttgaatcactcggctcgacattgggaaagcggaaatgccggccgccccgatcattgggttaatcttatctttacggaaaagattcaataatttggcgaacaatacacccccgacagagtccatgatgaaggcgaataatccaaaagcaatgatcatcaacgtttgaatgttcaagaattgatcagcttgcaatttaacggaaatcgttagcccaagcagaatcgacacaatattgaccaattcgttttgcgcggtgttagacagccgatcgagcaccccacattctcgcagcaggttaccaaacatcaggaacccaactaacggtaaggaaatcggggcaataaacccggcaataatcgtgataatgattggaaacagaatttttgtcgtctttgaaacgccttctgccttataagtcatccgaatccggcgttcatgctttgtggtcactgccttgatggccattggctggatgatcggcaccaatgccatatacgaatacgcagcgactgtgatggcccctaacagatttggcgcaagttggttcgaaacgaaaatcgaagtcgggccgtctgcggcaccgatgataccaattgaagccgcttctttgatattgaaaccgaagaagacagcaacaaaaacggtggcaaagatcccgaactgtgctgctgcaccgaacagtagcataaatgggttttgtaataacggtccaaaatcgatcatggcgccgatcccgatgaaaattagcagtgggaacagttccgtattgataccggctttgaataaaacatcaagcaccccttctgctttggtgccgccaacaacttgggtcaagacgcctgttcctggaaagttgaccagaatggcgcccaagcccatgggaactaaaagggttggttcatattcttttttgattcccagatacatcaggagcgcgccgatcagcatcatggcgatttgacctaatgtgatcgtggtgattccgtgaatgagcgcttccatgccatccctcctccttaaataatgctgatgagattgtcgccggaattgacattctggttaagtgttgcaaacacctggccgatggtacctgccttaggcgccacaatttcgttttccatcttcatggcttccagaatcatcagcggctgattttccgtgactgcatcaccgtctttaaccaaaatcttggtgaccgtgcctggcattggtgcagtgacaacttcaccttccccagtcggcgcaaccggagctgcaggtgctggcgcagctggtgcggccggtgccggtgtcggcgttgccgctggtgcggccggcgcaggctgggcggctggcgcaccgccaatttcttccatttcgaccaaataggttttcccatcaatcgtgatcttgaattttctcaacatcttcttcattccacctttttcttgattgacttgaccacataattggcatggccatcaccagccgcaatggcgctggcgatcaagccgacgcgttttgcttcaggattctcgacatacagatgcctcagcactaactgcgcatcaggagctgtatcggctgtgactgctgcggcaatcagactgacgggcagttctgatgccggatcaacagctaaatagtttgggacatcaatccaatcatcatcaaccggcgcggccggtgctgacatttggggtggcacttgttcttttgtagacggtgtttgctttcgtcgccgcagccaattaaacatctggacacctcctcgcaatattttcttgttgataagttatatagtacggggaaaagccaatcatgattggcttttcggtgtatttttcagttaggatgttatttttgcggcaggtagaatggcacgtgaccgaataacatcaccgtgacaacgaagatagcgaacacacctaacgcatatttaccagcttcgcgctgccatttacccatgtccaaaccggttaaccggagtaatagatagatgaaggcaactaatggtgacagtaagtggaacgcctgacccatcaaggaagccagcgccatctgcatgttggtaaacccatatgctcgaccggctgtagccagaaccggcatcactccgaagtagaagccgtcgttactcaggaagaaggtccctggtgctgaaatcaaagcaatgacaagtccccagaagccagccaatgaatcaggaataatggaagtgaaactcttggccagcgcttcggccatcccagtaccttggaacagacccatgaagacaccagcagcgaaaacaagaataacaacttggacagcatcgccaccgttggcaccgatccgcttgctttggtcgcccagtttcggatagttgaccattaaagcgatacaggttccaactaagaacaacaacaatggtggcattgcaatggctttaatgaaggaacttgcaaccaaccaagcaatcaagacgattgtcaaaataccattgaaaaggaataagtttgggcgccgaatttcagcaacttctgggtcgacaacggaagtcatttcatcgatttcagcatccgttaactctcggacacccaaccgtttccgttctgctcggcccatgcgcggtgcaacgtagaaaacaacatacgctaaggcaagaatcatacctggcaacagataggtcagaatatcagcgtcaactttcaacacggccattgctcgggcagttgggccgccccaaggcagtaagttcatgatggtgttctgcaaaataatcaaaacacctaagttcatcatgttcatgttgagctttttatagattggaataaatgcggaacagcagatcaaagttgtcgtcgtaccgtccccgttcagtgacacggccatcgcaacaatcgcggttgccatcaggactttcatcggatcgcccttcgcgattttgatcatccgggcagtaattggatcaaacaaaccagcgtctaacataattgagaagtacagaattgcgaataagagcatgatccccgtgttggcagttgttgtgagtcccttcaacacgaaatcgccgatcgtacctttattagccaccccggccaccatcgcaataatcgcaaacagcagggggatcataaccaaggaagtaaatggtgaaagtttcttagtcatgatgacatacataaagaccacgatcatggcgtaagcaatgacggtgagtaacatagtcccaacctcttttcataagtttttgtctctaccgtcatagtacgtgattatcgtcacgaaatcgcctctttagcccgtttagaacactaaaagaacaatcactgatcttccgataagaaaaatgtcaagaaaaatagaaaacgcctccattggcttaaaattagctttttaagtcaatggaggcgtccatcagttatgaatcatctttggaaaaagataatgctggcgtgatgttcatatattcacatactactaatacaggcgcgtaattctgtatcagtctaccagtcttggaaacgttcttcttcgagcttttttaacaactcctggtaatttttccgcgatggtgcatggctcaaggtcgtctgttgcagctcattaaatcgctctgctaagtaatatgcagtcagatagagcgtcagttttcgcttgacgatcgtctctggatctttgtcgtcaggcacttggtgcgattcaacaacaaggttcgcgaactgtttcggatttaaccgtaaatcatcgggttcatcggctttcatcgtgatacctccttttttaagtatgcctaatactaacataaaaaaacgaccgtaatctgtcattgaaaaacattttacggtcttcgaaagtatgaagttagatgatgtaaaaatcttgctggcagctcagaaacaagccacacacgactgctcgtgggataaaagaggatcccgtttttggctgcatcacgggcggcaatgcgataaataactggatgagtgtcatgacgggcaccgacttgccgagcagtggcgacatcttcagacagatgcacaaaatcccgattcatcggcagtaagccttccttagcaatcacagtagccgcctgatgtgaggtaccatgatacagccactgcggtggttcagttgctggtgtgagcggcatgactggcacactgtgaccgtaaaccgcccgaatcgttgttccttccaatgcaaatcgctttttagtgctttgtgccataatagcttgtaagacttggcgatcaagatgcatttgataatgcgcattgaagcgtcgcaccaatgttttccaatctgtccgaccatactgatctaacaccaagcccaacttttctggatggtggcgcaagagcatgcttaacgtcttgctaatcttgactaatcgcttatccatcattgtccgttcccttttacaccctttaaccttaactaggagagaaaacgatgaaactgcatttttcaaaagcacaattgaacgaccttgatacgatcatgactatcgaaacagcaggatttacgccacaagaggccgccactagaacctgcatggcatcacgcattaccaactatccggacaccttcattgttgcccgcgctggtggcacgattgttggttacgtagtcgggccagcaactgatcaaccaacgattacagatgatcttttcagtactagtcagcccaatcggcccgatgatccgtacatcgctgtcttaagcctcgctgtatccccgcgccatcgtcatcaaaatgtcggctctcaattacttgagcaactaacccagatcgcacgtacacaaaaccgccaagcgatcaccttaacctgtctacaacggttgatccctttttacgaacatcaaggctttcaaaatgaaggtcgtgctgcctctactcatgctggcgaagtctggtacaacatggttaaaaagatgctctactgacagccttcctcagcttattcgggattcagatgttggcgcaacaccggggcggtttcgttgaccagaaaaagcgggccatctgcctgcgccggaaaactcgtagccaaaccgcctagatcaaacggttcaaaaccaatcgtccagattaacgacgccaccacttttttcgcctgttcatcgtcaccagcgtacggtaccgcaatccgatcaactggttgttcaggttgtgccagcctagcgagaacggtcatcccaattgtattaaacgctttgaccactttacttgattgaaaatgctcggcgacgatctgagacgtcgtttttttatgacgttcaatctcagcaatccacgcatcgcgatcaggaaaataattggtggcatcaatgatgatcggatcttgagccaatggttccggtaaagccttaatagccaaaaaaggcactgccaagacgacaatttcttgtgcttcggcttgttcaactgtgccagcttctgctcctagaacgcgcgctaaatcctctagcgcatcgactgaaccccgatgtgcgatgacaacttcattgcctgcttgcacgaaaagttgcgtcagaacctgtccgacattgcctgatccgatcataccaattttcatccgatatcactccaccctgttattattttcattatatcgcgacacctcttttcagggcaaataagccttgtttttttatgtatcggcttttccggtttggctttgactggatgtcaaacgatgctcatgctggtgacgctgagccaatcacttaagatcagttaacaaatagttttcaggcttcaactattttgctttacatactagtcaacgctctttatactactagtaggcaatacatattagttgggaggtacatgtgatggcaacagataccaatagccaaatgctcaaggggattcttcaaggctgcctgttaattctgctttcccgagaagagctttacggctatgccatcagtgaggcgcttaacgattttggctttgttgatattcccaaaggcacgatttacccactcctgatgacaatggagagaaaagggttgttaatcagtcatctgcgtccctcacctgacggccccagccgcaagtactacgccgtcacagcagagggtatggctgcgcgtcaaacttttcaacagcagtggtcacaactgaaggaccatgtcgatcagctcatcaacgaggaggacaagccatgaaacaacggaagcaggaaacacagcgattaattgatgaaaatgaccaattgcgaaaacagcttaatgtggaaagtcgccattattatgaagacttaatcgtctatatgcgtgctcatacgctgtttcgcgatgatcatattgttgaagaaaacttaatggccattcttcaagacttgattgatgcacaacagaatggcatggatgctgaaacgtattttgggaaagatcccgcgcaaacggggacagagatgctgaaagcaattcccataaatattgttgactttgtttggtttaatttgaagttaatgatgatgttaatccttctcacgctgctgcctagcctgacgacttccgaggtaaagcttgatggtggtaatcttctatttgtgagcatcatcattttgatagcgacatggagccttctctggatagtcggcagtaacgcattcaccacaccatcacgcactcaaaaagtaggctttttcattggtggtggtgccatttttgctggcacagtgggattgcttttcttttttaaaacaagttggcaactcacaatttcaccgcaaatttcgttcattctaattgtcagtggcttgattgttggtgcgttgctaccgttcttctctcgccccactggaatcaagttgttcctctacttttattcgatgggttatttactactgggtctgctcgtccatttaccattcacccgcaaaattatgacggcaagaattcatttaggtgcttggcagtggttgctctgggttggtctggcaatttttgcaattttgataggactagtttcttggtggttcattcgccgagagcgtaggcatgacccagatagataagatgccgtgattaatttcgtgacgaggcaagttgcctcgttttttaatgtaaaatagccttaatcccaatcaacccaaaggagtgacccccacttggatctcaatgacacccttcgtcaccaactgcaccatcgttccatccgccagttcaagccgcagcatttaagcagcgccactattcgaacattgctggatgtggcgcaacatacagcgacctcaatgtacttgcagttgttttcggttattcacattatcaatcctgaaattcgtgcacaaattgctaaaatcagcacgcagacctatttgaacggcaatggtgaactgttcattttcatcgcagacctcaatcgcgttgcgaaactgacagcagctgctggtcaatcactggatcgtcttggccgaatggataagtttctgcaggcgagtgccgatgctacacttgccttacaaaatatggttgtcgcttccgagagtcttggcctcggaacggtaacccttggcagtattcaaaatgatgcgcaggccctgattgagttgctgcatctgcctaaatacacctttccactacttggtctggcgattggttttcccgacgatgatcccgacgaaaagccacggatgccacagcaattggttgctttcacagaccactatgatgaacctgtcccttcaccgacagccatgactgactttgaccgcactgttagccactactacaccactcgccgcggcgatccgcgcgaagaaagctataccgatctttcgattggcgctgccaggaccacaccggcaaaacgcggcgatctcttcaaagtcttgaaacaccaaggctttttccaggaaagttgatcttaaacttatcccactgccgataaaatcctgccgcagaggctgatacataattctcagccaaacaaaaaaaggaacactttttcctgcaaaatcggaaagttgttcctttttgacttctcgtggcatatttagtgcgactttaaagaacgtagtgccaaggcggagcaatcgtaggccagatggggctcagccgtgcaaacaacacagcgacggtctgtggagctgatgttgttaggcgacttcgagaccgcgggctttgcgggctcgaagcgccgtctccgctctagctacgcgtcgccaccccagctggccggagattgcggagtttggcacggcaagtatattttagcctagaaccttcctagcgactattcggaatttaatgaatcacaagtcttgtgagagaattatggctcacacttttcgttgttagcaatcacctagattgtaccgattttcagctcctctcgtcctctcaatcaccacaccaaaaaattgactgacgagtcaatattccgttgactagccagtcaatcgcgactatactgcaggcgaaaaggttgatcagacaccgacatattaaaacgtgtttcaagtttgaccttaaggaggatgacaaaaatgacaacagctattatcgaacttgaccatcttcaaaaaaactttggcaagtttgccgcattaaaagatgtcagtttcacgttggcacccggtcaggttctgggttttctaggacctaatggggccggcaaatccacgaccattcgagttattttaggcttattaaaaaagagtggcggctcagtgaccgtcttcggcaaagatgcctggcgggatgatgcggcgattcatccacgcatcgcctatattcctggggacgtttatttatggccaaatctttctggcggcgaaattatcgacctattgctacgtttaaatggccgccagcataatcaaaagaccgatgaactaatcaaggcctttgaatttgatccgaagaaaaaagctcgtacctattcaaaaggcaatcgtcaaaaagtagcgttaattgctgcgttgtcgcaagatgccgatttgtatatttttgatgaacccacttctgggcttgatccattaaatgaacagactttccagcaagaagttttaaaactgaaaagagccggtaaaagtgtgctgctatcaagccacattttgtccgaagtcgagcgaatgtgtgattcaattgttatcatccgtgatggtagtgtgattgagagcggcaatcttgatcaattacggcatctatcgcggatcaaaattgaagtcaccaccgctaccccaatgactgctttggcaaagcaagctggcgttcacgacctcacttatcgcgattccgagcacaccaaggcggttttcaccactgatcgagacgcgcttggcaccatcatgaccacactggccgccaacaccgtggtcgacatgcaatcaacgccgcctacgcttgaagatttgtttctgcgttattatggaaagcaaggtgagactcatgcggcacagtaatcggaacgcaggttatctgcttcgggcaaacctcaaacaaaatctaaaattttcactcatctggcttgtcattttgatcatgatgattgccagtggtgctggcaaattggaagcagcctttgcaggcggggcctcgggctctaaagagattgtcaaaatgctgcgagcgccgggcatggcggcaatgtttggcgcgatgccaaaggtggacacgtataacacagcgattgtgtttgctggtgtgatggtcgtcttcatgattattttgcaggccttatgggttatgccgctgatgattcgcaacacccgcggtcaagaagaaagtggcttgctcgaaatggttcgcgctcgcaatgttgggcgaacggctgccatcaccgccgcttcgcttgagcttctcatcgacagtgccataatgggtatcctctattttgtctcgttggccgctgtcaacatgggtggtactgacttgtacggtgacttcctgttttcactggggatggtgatcgccaacttgctattcggagccattgcgttgctattcgcgcaactaaccaataacacacgtacagccaatatgttgagctacatggtactgactgccgcttatttggttcggctggtcaccgatatccagcatcaaaatctgacgtggttatcaccaattggttggttcgaaaaagcaaacttctatactgataacaacgtctgggctttaggtttggccttactggtcagcattctgcttgcggccagcgccaccatgattgcccgcaaccgcgatctgggcgccgggattattgctgaacgcaccggccgagccaaagctgccggctggcttcgctcgatccctgccttactgtggcgaactgagcgcggattatttgctgggtggttaatcggcgccgtggtgtttggcggcgtcatgggtagtgtgctcggcggcgttggcgacattcttaaaacgaatccgctttatcgtaaaatactagatgttggccaaatcaacgctgccaatcagaccatggtcctgtcattcttaggcatgtatctcggcattttcgtcgcattagccgtgactgctggcgtccaagtagcattccgactcaaacgcgatgacaaccttggttacttgagcgtcattcatgccgaaaagccaacgcgaaccacgatcagtgtcagctattattgctttggtctgctggcaggcgtgttcgtcctttctgccgggctgctggccttgttcttcactgggaacactgttctcagtcacccgttgccgctcaagtacctcggtcgcctatttgcggctagcgttccggctgtgatatcgtttatcgcccttggcatcgcactagtcggtctgtggccacgcttaagcagtttattctggctgtatatgggagccggtctgattgttcaaattttccggggattgtttgatttgccaaaacacgcaggcaacttcacaccttttggctggattgccaatgtaccggttgaaaacgttgatcaaacatggctaatcgtgatggttgttagctctatagtattatttattcttggtattgccggttatcgtcgtcaggatctgagcttatgaaaaatgttgtgacagatcccgaaaaagtcacccgtatactcaaaacagcgacggaaattttcggccagcaaggcttcatcaagagcaaaaccgatcagattgccaaccaagcacaagtatctaagggcttgctcttccattattttggcaataaacaagcgctgtatcttgacgctttcaaatatgcctatcatcggatttatgatcacatggaccccaaaaagtggcagaatgcccctggcttggctgccatgatgaccactgcagttaagtatgagttgaaactgcaattcaaattcccggctgaataccgcttgatgatgcaagcctatgctgatttaccgcattttcccgaaccgttgcgacaacaagtgcagcaagaaacaactgccatatccgctgaagccgatcgcattttccgcgagaaaattgaacagctgcctcgtcgtgagggcctgtcagtcgatgacgttttcggtgtcgtttctgccttaatcgcccaacaaacagcggtcaccaccagactcattgccagtggccattatcgcaagtttgaagatctgcagtccgtggttgagacgatggcacgccagttattgattgtcgaacacggctttttaccagatgaaagttgacgtcagctgatagattaaaaaaaccgcctgcactgatctgattcagtacaggcggttttttagatcataaaccagaaatgccttaccttattcaaccttttttgtacttgtcagcttgaacagacgagcatacaaccagaagtttaagatgccaatcgctagtagcaggccaaaagccagctgactgccaatcccaacattttgggcgtgagacaagcctgggacagtaacagccgtcatcatgccagctaaaacggtagtccccattgaacctgtcacttgctgccctgtgctatataaggcatttgcgtcgctttgatcatcaggttggatgactttcaagccatatgctgtactgttgccaaaagccatggaacggccgatggcaaaaatcagatacaagatcgtgacccaaagtacgctgatgtggcggccaaaaatcgtaaagccgagcacgccgagcgtaaatagcgtgttgccaagaaataacggcaaccgtccaccaaaatggtctaacatccaaccgtaaaccggctgaccaaggccattgaagacactgccaggcaagagaattaacccgccaataaaagcagttgccccgtcaacagtttgcacatagtttggcagcaaaaaattaattccaacattcgaaaactgcaagagaatatatggcagaaaactgtataggaaccctggatcgtggaaaacatccaacttaaacaaagttttggcgtgatgatttgacaaccaaacgaaaactgtcatggctgcaaccacgatcaataaacccacacacgcagttaaccatttccgatcactgacaccattcaatgcaacggtcaaactgatcaaggccacaccgagagccgtaaaacgcagccaatcaaaagcaaaatctgaagttggcgtgtattgtttgattcttccctgtcccagcacaagtaacaaaattgcaaacggcaaggtgctccagaaaatcattcgccaatcaaagaagtttgccacggcaccgccaaaggttggtccaagcgccggtccaatcagaataatgaggttcgcgacgcccatgtaggtaccaagtttacttgtcggtaccgtatccaaaataatattgaccatcagaggactacacaaaccgacacaacctgcttgaaccagccggcccgcaagcaacacccagaacactggtgccagtgcgcacatcaagtcgccaataatgaacagcaatgctgccgtcacaaacagctgtcggttggtaaatcttcttttcatgtaagcagaactcagcatgattagcgccgcggccaaaagatagcccgaagtcacccactggacggtcgtcaaagacacattaaaatcatgcatcaaagttggaaaagtgacattcattgaagtttccgttaacacccccaaaaatgacatgagcgctacaatgctgatcacaagcaatgcgtgccgagcattagtttcttttacttcaatcgttgtcttcgccatgatcaatccccttcggtttctatcataagacgcaatattttcagtaacaacgtcgaattttaaaagggcttatgaaagcggcctgaaatagcagccattttaacaatctttccatccataaatgcgatacgatagaagcattagttaacggaggaatcacacatgacaatcatcttgcttttcctcggctttttggtcggggcttttattatgacaatgggcggcggtggcggtgctttttaccttggcatcatgaccggcgtcgcgcatctgtcacccggcaccgctgcggcgacatcgctatttaccgccattccggccttggcggttgggtgttacagccattatcgtacagggaatatgcgttttcacgcgggtaacgaaatcctgatgaccgccgtgcctgccacgattattggcagtcttgcagcgccacatattcccgaagtcgtctattcatgggcgatcgcggtcatttttgtagtgctcggtgtccaaatgttacgtcaatcgttcgcgcgcaaagtcaaaaaagccacccaacctgcgtggttcgcctatgtcctcggcgcaattagtggcctcatggttggtgttgccggattaagcggtggcggcccgatcatggccggtctcatgttaatggggctcgacatgccacatgcggcagcgacttcttcgtacgctttagttgctttgtcagtcattggctgtcttttgcacgccacccaaggcacgattgcctggcaggtcggcggcttattgatgttaggatcgctggttggtgccgcgattaccccgcgtattctcaatcgcttcgatccgcgcctgctgacagctatcttgcggccaattcttgggatcatgctcctgataatggcggtgacccaggtttggtaacgcaattcaactaacttaaccaacagttattttttctgtgtcaaacttgaaaacagcgcgattgttttccttcaccttggcaacgataatgaaggtgaataaggaaggggtgaacgatcatgcatattgatcaagtgattcgcgaacggcgcctagctttaggactcacgcaagaggaactcgccaacaaaattggcgtttcggccccagctgttagtaaatgggaaaaaggggtgtcatatcctgacattaccttgctgccagcgttggctcgcattttaggcacggatgttaatacgctgcttactttcagtgtcacgatggatccagaagagagtcgccacctgtacgaaaaactgatgacgactgccaaagatgccggatggcaagcggccgttgatctcgccgaagcgcagattgcacattacccgtcaatgaatagtttgcagttgatgattgcggcttttttacaaagtctgaaaagtcaaatacctgaagcagactggccttcagtgtatcaacaaattgttgccatttatcaaactgcggaaaagagcactgatctgccacaggcacaagtagcggcccaaagtctcttttacctgtacctcaaggaaaaagattttgatgctgccgagaagcaattgacgctgttacctcctgaagtggtcgcctataacgccatggagccaaaattgaaattacagcgcggtcaactcatggatgcttacattagcggcgaaaagttgcttggtactggcttgggggccgtctcgcttattctgaatgtactcactcaagttggtcttgctgatcaccagcttgctgttgccaaacggtatgctgacatgagccaaaaaatagacaacctgatccctatctccaatccttatacgctcgaagctcagttgaaagttgcagaagctagtaatgacccaaatcaagctgttacgatcattaaagaggtgttggccaatctcaatcaaccgcagccactggtattgcagcatttgaccccagccaaaagcaaggaacaggtctcgctcaaggaagctcaacggcaactgttgcaaatcttcaccgccgatcccgaaatggcttttctccaaaaaagtcccagcttccaacagctactccatgaatacaatctctaacaaaatgacatcatgactaaaacacgaaaggccttcgacaggtagcaagttgtcgaaggccttttaatgtctcattcaattaaatcagttcgtaattttcccattattcagaaattcatacagataccgattcaccaatgggttgtgctcatgtagctggctatgctgcgccttgctattggtaatctcgcgctcagtataacttttcgcccgcccggcaacaacataccgcaaggaacgtgctgaattgactggcactcggccatctgtgcccttgcctaggttgccaaatagattcaaaacggcggcagttttgggaaaatacctgcgattgtcatacaacggtttgtaccgatccgacataacgttaggccgcccatctttagcaagggtaatatgctgtccgccgttcattcccggcataccgggaaacccgttaaacggcccggcaatcgtgattagtcgccgcaattgcggcatcccctgcttatctggcgtcactgcccagtttgcccaagcagccgaaccggccgagtgcccgacagcgttgaagttcttgataccataacgtttcttcagttgtttgagaattttacctaaggttggcgcatctggtcggccgctgctgaagacaacggcaatcagtgggtgtttcacactggcagaccaagaaccgctcacggacaactgcccagtgttggtgacggtatagcgtaatacttgctgatacccgggatgtttgctgagatcagcaatcatatctttttccgatccatagccaccaccaaaaccatgaacaaacaatgttggcgtttggtacgtacctgttgctcgcgcagtggacggtgccgacccgcgattcatccaaaaccacgcaccgccactaatgatgagtacgatgaccactgccagtatgactttgatccattttttcatgagcataagccctcgccttcatttgaagcttcatgctttgcattctaacacgatctcactaaattaaaaccacaaacgctcttgcttcgtctatcaactatttaagtgaattaacttgccaaaacacaagatcctcggtatagtgcattagtaatctaatacactagtaaggaggcacaccgtggaatttgacgataagatcccaatctattatcagatcaaacaatacttgtatcaggaaatcatcaccgatcgacttaaatcaggcgatcaactaccggctgttcggcaacttgccgcagacctaaccgtcaatgtcaacacggttcagcgcgccttgactgaactcattcaggaaggcgtccttgaaacaaaacggggacgcggcaatttcgtcacaaatgatatgaaagtgctaattgatatgaaaaaacgcgtcattgcgacagaattagatcgcctttatcaccaactatcagaattgaatttaagtgatgaggaaatgaaagacgcattcgccgcttatgttgatgagcaggaggtaaaacatgacaactaacatgatcacagtcaaacaattgacttataaacgcaatcgtaaagtgattctagacgacttgaatcttgacctcgttcaaggtcacttcatcggcttattaggtgcaaacggtgccggcaaaaccacattgatgcgactgttaaacggggtcgcgaccacttttcatggcaccattcaaattggctcatcagaaagtattgttgaacggaaacaactaagcagcttcagtgagtcgttaaatggcgtcaacccaaatcgaacgctcaagcaaattgccacttattatgccgacatgtatcttgatttttctgaagccgagtttgctaacttcctgaagacatttgatcttgattcccaccagaagctggcggccctgtcaaaaggtaatcgcaaaaaattgatcgctgcactgacccttgcccgccaaactcaactttatctgctagatgaaccttttgaaggtatcgatagcatgacgcgcaaacggatcatcagtaacttgattgcgtggaaaccggcagcggcaactgtgattatttcggatcatcacgtaagcgacgttgccaatgtgttggatgaggttgtcatcattaaaggcaagcacgtggtggcacaaaaaaatgccgaagagttgcgagaaaaaaccggcatgagtattgaaaactattatgaaagtttctatgaaggaagtgaccaacaatgactaatacatggacaatgatgcgaaccttgacccggcaacgttcactaacagcatttaaaacattcatcgtgactttggttgcgaccgttgtatcaatcctactagcgatgttcactggtgaagcaaaaatcaccgtcgattttgtcttaacccttctctttgcttatgctgtaattggcggtttggtgttttttgttagattggcgatcattcaagagcgtgtttgggtcaataactactatcgatcagtgccaaccaccaaccttaaactttatactgctaatctgctggcaacctgcctatcatttctgatatatgctgccttcgaaggtgttgttttactagcacttgcagtgacgcgttggggtatcaacttaccaacgggtgatcccatgaccgtgttagtcgaaatggggatattcctgattgtcttagggatatttatctgggcatttatcagtcttgttcacttgttatcagtgaccattatggcgttcctgccagaaactcgaattcgccttgttcaatggattatctatctggtggttatcattgttgcttcgttcatattcgatcaggtccaacgcctgttcttactaccctttggtggttatgacagcaatactttgacaggttcttcaagcgttctcgtcggcatcgggatcttcatcgtcaccatcctgctgatctctgcagtgaatgtttacctgcttgaaaagtgggttgaaactaaataatgcgccctaaacgatgaaacctattgacaaaaaaatggggaaaatatgcttaaaatcatagctaaacaatttttacaaaactggaagatatggctggccctcttaccgattttcattgtttccggcatcgtcttcagtacatctctaattttactgacggcgatggcaaccattcctgtcgcttcaggcactgattatggtgtttttatgcaaacgccgatcatcattggtggggtcgttttgtgcttattaacgaacaatgccatgaaacagtgtatcgatttctttgatgacacgaatgatgtgatgctcttgctaggggcatcccctgtccagttaagttttctgatgactgggcaagtgctcctgactggtgtccttggcgcggttatcggcatgcttttcgcaatcccagctggccgcggttttttaagcctcttacccgtgagtgcttcttctgagtctttagtcaggctacctctgagcttctcatggcaaatggttcgaaccgttttaattcttcaggctttgttgatcgtgatgacttgtatgcgttactgccttaagacttaccaacgaagaaagggcgcgttagttgcgagtctgcacaagcatcgaaaaatcgtcggtagttttctaggaatcgtcacccttatagcaagtttggttgtgacaatcctcctatttttaaaacccgtgcctgatccaacttcagccaatgcgtataacaacagtatgaagggttcaatgaattttttactgttgctatggcctttagtgattatcagcatgaacttcctgatcagaccgttgtttatcaaaatggttcgcgtcattgttcatataccgtccatggccaaacagccgatgatccgttccgcctttcatgacttgcaacaccacgaggaggcggtcattaaattaattcgcccggtcagtgtcatcgtgttacttgccggaaacttcatcgctttgtttcttaatacgaagctgctagtggatggcaacaatggcggcgcggttatctatgatctggcagtgagtctgatttttgtatttggggcacctatcatgattagtcttgccagtattttgacatcaattagtctttttaaaatgaaaacggcagcagaatctgatcattactttttctctgggtgcaccccaagctggatcttcaatttaaaactgaccgaaatcggtgctgcaactattctcgcaatcttaataacatttcttggaacaagcctattcgctattccgctgttgcgagttgcgtttttaggcggcggtgatctttctaaggcaaactggaccgtcaatatcctcctgacttttggggtattcggaatatttttcctttgtttgacgctggtctattggtcagaacggacgcaccgcaaagcttatgtcaatgaataagcatacgaggaggaaaagagatgaatgatgtagtcgtttccgtcaaacatttaacaaaagaggttgcgttagctcagggaaatacgctgaaggtgcttgatgatatttcttttgacgtcaatcaaggcgtatttgtgtcgattgttggtccatccggatcaggaaaatcgacactgctctactgtatttctagtctattaccaccttctaaaggcaaaatcctgattaaaggaaaatcaccatacgagtggcgtgcttcaaagttggcaaaatttcgtcggaaagagataggttttatttttcaggactttcagttagtcagctctttatctgcttatgacaatttactgcttccgggtattctaaatggtcagaaaattaaaccgccaatggttgacgcattagcagcgaaactcgaattgacagccgagttacaccagtcgattgacgcgctttctggcggagaacaacagcgcgtcgccattgcgcgaactgtgcttgctgacccagatatcatttttctagatgaaccgacaagtgcactagacacgcattcacgtcagttagtcatgaagctatttcaagaactggtcaatcaaggcaagactttgatcatggtcacccatgatttagaactcgctggggaaacttcacggtcgattgtgctacgagatggccgaattgaaagggagattcaaatgcccgcggctgaaactgtgcgtatctgaatcattggcaggcagtttctgtttagctaatgattgaagtgatattacaattttccagttcatttccacgtcctcttcgcatcaacaatgaaacagcgtccctcagcctttttaaggcatgagaggcgctgtttgtgttagacctttctgttcatttgtaaccactcgctgcgtaataaggagtattcattttcatcatggaaaccatctgctagtttttccccggcgcgatgagtgccatcgtgatgaaaaccggcctttttggcgacggcattgcttggtgcattgtcgacagcagcgcgaatgatcactttgttgaccccgtactcttcaaaaccgatctggcacattgctttcaccgcccgatgcatcagcccgtgaccacgcacagcttgtttaagccagtaaccaatatcaccactttcatcactcgggcgaaaatgattgaagctgatcatcccaaccggctcatcccgataccataaaaccaagttcattgactcctcacggccaaaatgatcattgacgctccgcaaaaatgctgcttcctcggcctccgtttttaatccattcgcccaaggtaaaaatcgaccgatatcatcgcgttcttgatcgataattgcaaagagcggtgctgaatccagccgcggacgcggtaatgccaacttaaaatcgtcatcaatcacataacttaacatgctaaacaccttcatctcgcgtttattgcgctaacacccaatgcgccggtgctgcttcgaccagtgaggcagtcggatcaagcgcctgccggtcaaagtgcaacaccggtttttgctgctcaagcattggatcagcctgcggaaccgatgacagcagcgtctgcgtgtaaggatgcagcggatggtgataaattgcatctgtatcgcccgcctcaacgatgcgaccttgatacatgaccacaattttatcactaatgtagtgaaccatcgatagatcatgggcaataaaaagataggttaagtgttgttcatactgaatttgccgcaacaaattgacaatctgtgcctgaatcgacacgtccaacgctgaaatcggctcatcaagcactaaaaacttaggctgtaccgccaaagctcgagcaatgcctattcgttgccgttgtccaccagaaaattcatggggaaaacgattaatcgcgtctgcaggtaaaccaacctgcgtcaacagtcgtaaaacttgcgcaagccttgcttccctcgaggtggccaaatgaaaattgtcgatgccttcagcaatgatatcgaccactttttgccgcggattcaaggattcgaacggatcttgaaacaccatctggacctgacggcgaaagcctttgcgcgccgcatgtgaaaaatgacggatcgactgaccgccaaaaagaacatcaccaccggaaatcggaccaatcccagcgatagcgcgtccagttgttgtcttacctgacccagactcgccaaccaaaccgactgtggttccggcattgatcgtgaagttaatttgatcaacggctttgattgcttgccgccctttataaaaagtgacacttagatcgttcatcgtcaataacggttctgtcaaactggcacacctcccgcttgctggctttcaactactggatcgtttgtctgttcagcatgcaactgagcaaatcgcgcccaacgtttctgaatagtgactggtggctgatagtgtggggttcgcggatctaataaccacgaacgtacaaaatgtgtcggcgatacttgaaacaacggcggttcttttttaaagtcgattggcattgcgtaaggattgcgcggagcaaaagcatcccccttaataggttgatgcaaatcaggtggcgttcccggcaaggtaaacaattggtcacgttgatcatctgaactaggaacggcatctagcaatccccaagtatagggatgctggggatgatagaaaatctcgttagctgtccccacttcgacaattttgcccgcatacataatcgccacacgatccgcaatgttggcgactacgcctaagtcatgggtgatgaaaatgacactcaaatcatgtttggctttttgcgctttaatcaacgccaaaatttgtgcctgcaacgtcacgtccaacgcagtggtcggttcatcagcaatcagaactttgggctgcatcaccagcgccatggcgatcatcgcgcgttgacgctgaccgccagaaagttcatgcggatatttgcgggcaatcaaagctgggtcagctaatccgacatcttcaatcgccgcaaacactgcctgcttcaaggcctgaccgtgaacatggcgatgcaccttcaagccttcgccaatctggcggccaatgcgcatcgtcggattcaaaccgctaagtggatcttgaaaaatcagccccagctcttgcccgcgcagatgggtgtactgacgccgactcgtctgcaataaatccgtctcgccatacagcatctcgtcagcagtcaccacagcatccttgcccaacaaccccagcaaagcatgggttgccaccgacttgcctgatcccgattcgcctaccaacgctaacgtttcgccttgacgcaaatttaaatccacgccgttaacagcataaacttgttcattaccttcattaaaaatgacctttaaatttttaactgtgacgatgtccgtcatatgttcacttccttcaatcgcattttgaacttaacaatgccgctaaccacttacttttcatatagaaatagatcgacgataatgccgccaaacaaattgatcgccgttagcacactcatctctaaatttgtcggtgagtgtttgataaactgtgcagtcagatggccatgcggtcgttcagtatgccaaatcaatctcatagccagcaagaacaccgtcacgcctgcaagaagccaaaaggtttgatgaagcccccacaacaaggctagcaggaaatggttttggcgcagtgcaaggcctgttgtcaccaacaaaaggccagcaaacgcacctgcgacaatttgccaatgatgtttctgcatcactcaaaaaacctccttttcttcgcattgatttcaggcacataccagtagcttttgggtgagacaaaggtcgtctcttactgtcatgtgcgctaaaattagcctagctttggaatttagggtcaagcgcatcccgcaagccgtccccgacaatgttgaaagcaaaaacaattgcaaccaacactagaatcggcacataaagctgcatggggtgctgcaacatctgatcctgaccatttgaaatcaaaatccctaagctggtattgggtgcctgaatgcccattcccaagaaacttagacttgcttcaccaaaaatattctgcggaatgctttgaccgatgtccaaaatcaaaatgctcatcatgttgggtacgagatgtcgtgtcataatccgccatagcggggtgtctaacatcactgcggccgtcacgtaatccaatccgcgtaattgcatcaccaaaccgcgcgcctgccgtgctgaactcgaccaactagtcactgccagcgcaaataacatcgtccaaacgccgtcgcctagcacgatcatcagcagcatcgtaatcaacaaactcggaagtgaattgaaaacttcaataatccgcatcatcacttcatccacccagccgccaaaaaatgccatagtcatgccgtagatcgttccgaacccaatcgccaagatcgtacttaaaatagcgaccaataaggacacttgaaccccaaggcatagacgggtaaaaagatctcgtcccagtcgatcggtccccagccaatgcgcagtactcggaccaatattccgactgtcaactcggattagatttggatcatagtgttgtatttttggcccaataagcgcaaccatgacaattaaaatcaaaatcacggtccagaacatggctaaccgatctttgaatagcttgtgacgcgctgaggcccagaaaccaacacttttaggcacaccctcgtggacattgatttctggcgttgcccctgactgatcaaaagttgcgtcagagccaaccgatgcagcttcactaccaactgtcggttcttttttgaaaaattgaaaatcctgattgcttgcggccatgtgttgattagcctccttaatggcactttgtttaaacgcgttcgctgacccagaaacctccgtgtaaggacctcaagcgcaatggcccaagtgcggcccatcacgcccaaggcctcttacactccggtttctaaccgggtcagctcacgctcttctttaaacgcgttcaccagcccagaaacctccgtgtaaggacctcaagcgcaatggccaaagtacggccatcacgcttgaggcctcttacactccggtttctaacccggctggctcacgctctgtcatataatttaatgcgtgggtctgccaaggtgtatagcatatcggtgatgaacattgtgacgatgtagaggatggccagtaggacggtttcgcccatgatgataggcacatcgcggttgtttaaggcggtaacgaagtattggccgacaccagggatcacaaaaatgctttcgatgaaaattgaacccgtgatgccgaatgccaaggtcaccggcaaagaagtgatgatgggaattgaagcattgcgaacaatgtggtgcaacactatctgcgattctgatagtccttttgcccgagccgtcatgacatattcactagaggcaacatccaccatcgaattttttaaaaggcgggcatagattgcgatgtaagtcacgccgccagcaatggttggcaaaatcgtataaatccagccgccccaccaagtttggtcgccgctgggccaaccaatgattggaaaccagccaagtttgcctccaaagtagctttgcaacaacaatcccagcacgaggcttgggattgacatcagaaaaagcgctacaatggtgaccgtccgatcaagccatgtatttttatacacggctgctaaaatacctagtaacaaccccagtggaatgccaaacagcatctgttgaatgcccaatcgagccgatgcgggcaagcgatcccgaatcaagctgctaatcgtcactgacggatcagaaattgattcaccaaattgaccatgaagcatgttgttcatcgtgataccataacgttccaaaactggcttatctaagcccgtattttgatacacctgtgctctggtagctgctggcagtttgtcggtttgcgcactcaacgcatctcccggaactgctgcgaccataaaaaatgtggccgttgcaattaaaaaagtagcaatcagcaattcaacaaatcgtcgaacaatcaatttgaccatggtgctaattgcccccttttgacatcgtcatgccgcataaactgacatctcctttaaaaccctatggacaccaaccgccaacatcaatcagcatcaaaaagtcatcattcttttgatgcgtaagtgtaattaaacgtaccgccgaagaccgtcgtttgaagattcttgacagacttattgatataaatccgcgattgcgggttggtcaatggtacgacaccgaagtccttggcaaccaactgattttcaagctgcttgtagagcgttaatcgttgtgccgccgtgaggttaccgtttaattggtcgtccagatcatcaaaagtcttgctgttatagccaccaaagaatttttggaatccattgccagaattccataggctcaagtaggcgttcggatcagccgttgctaaccagccattagccagcagatcgtattgattgtcatttcgcatttggataaagctggcagtatcaggtgctgttttgacggtcactttgacaccaagattttcctgaatcgtttgcttcaaccacgtggccgtatcatcactgccaagcgtcaaataaacaaagttgagtttagtcaaatcagtcgacttccctaattcttgtaaaccttctttcaacaatgcttgtcgcttcgccttcgtgttgtactgtgcctgtgccgttttcaacggattgccgacgtactcgccataattggtcccgctcacatccaacgactgcggcaccatcgtgtatgttggcttgtcccgaccatcattcactgccttgttatagctcgttcgatcaattgacaaggaaaaagcttcacgaaccttcacatttttgaaaagtccttgggttccaccgttgtgttgattcatgatcaacactttcgttgtcgaaccgttctgttttcgagagacgagtttgctgcttttggcgagttgattaaaatcgctgatcagcttgcctgaggcagatagtgcgtccaactgaccactttgcatgagcgaaagaaccgttgatggttttttcaccgttgtgtaattcacggtctggagcttcactttcttagcgttccagtatgttttatttttcttgagcgtgatcttgtcgtcctttttccaagacgtcaatttaaacgggccattgaaaacttgatcttgcacgtcggttttccactttttgttgccgactttgttaatcttgtccaagcgcactgggtaataaatcacggttgccatatctgacaaaagtgatggataagcataggccagcctgatttgcagtgttttcgcatccaaggctttcacccctaaagcggtcacactgcctttgccggtgttataggcttcggcccctttgataaagtacgcgctcgaagcctgcgcaaaagcattttccttcttcagcagacgctgaaacgaatcaacatactgctgggcagtcacggcttttccgtctgaccattttgcatcgcgcaacttgaacgtataggtcaacccatcggccgacttggtataagatttggcgccggtcagcaccaccctatccttgccattcgtcgattcaatggtcgtcagcccttcttgcacctcagacaaaatgtcattttcgttcgagttccgcatatcattcacatcgagtgtggttggatcatctgtttctgacaaattcaaagtctgccttgaacccgacgccgaagtgtttttactgccgcaagcgacgagaatggtggcgagtgccaagccggtgataagtgctgttaccaagtggttcttctgcataaaaaattcatctcccaaaacaaaataaaactggcgatgcatctagagttctagatacaccgccagttttgtccttcgttcaagtcaagtaatcccgtcacccaaaccaaaccctagccatgtaaatagaactgctgtgtgattcacagcagcagcacattgacatggacatggcttggttaaactttgtcatcacggcgactccttccgaagaaattagcaacagcatacttttaaaaaaatagttcgtcaatgtgaaaatttaaaaaattgactcattggcattgcatcatcgtcatcatttggcaacaaaagttcgatgtatcagtgcttataggcaacataaaaacagcattaaaaaactaatgtttgagttgcggtaccagtaaatcagtcagtgctttgacagaaaatgggttttgtccggtaattagctgaccgtcttgaactgcgaacgacttatatgctcttttttgtacaaaatgagcattgtgtttatttgcaaccgttttgtttaaaaaaggaacaactttttgtttaccggctaaaatctcttcagcatgtgtaaaacctgtgatcttcttaccagcaatcaaatactgaccagcttggtctttgatatttagcaaaccagcgacgccatgacaaactgatgtcacgtatccttgatgctgataaattgccagcgctattgcttgaagtgcctgattgtctggaaaatcccacataacgccatggcccccagtgaaataaatggcgtcatattcagctggattgacttgctctggccgtaatgatgctgtcaaagcgcgttcttgaaaatcgtgatcttcatatattttcatgattgctgggttcgtatatttcatgcttcgtggatcaagggggacaaagccgcctttcggactcacatagtcaaccgcgatgttggcttgctgcatcgcatcaacaaattctgctgcttctcccaaccacaatccggttggttcatctgtatgctgataacgggttgtattcgttaacacaacaagtacttttgtcattttgctgcctcctgaatcacggatgtcacatcatccaaaacttgtttcagctgattaattgagcttgtatcatgggataaataataataattccgcgttcccacgcgccggtatgccactaatcccgcctgctttaagattttcaggtgatgtgaaaccgcaggccgcgataacgcagtcgccgtcgtcagttcacttacgcgttttccctgacaaggttgatccgctaacaaagcgatgataatcgcttgacgcttttcatcgcccagcgcgacaagaaaatcaccaacatcagacagttctttttgcaactgttttaggcttgacatttctttgccctttcgtttaattatttaaaccattaaagcatgtaatgttgttaaagtcaataaatcgacacttggaggtgagaccacgattactgggattttccttccacagaaatgcgcttgtctactcctgaccggcaacaaaaaagctgatcacagcgtgttgccgcaaccagctaaactgaaccaaaaataccatctgacttgacgcctatgcgtgcgctgatttgcgcatcaaaacggctaacaaggcgatccctgcaagtgtgaacaaaattgccggcatcaaattagcggccgtaaacatcacgaaggccatcgtggcgaacaagccgccgatcgacaaaccaatgccccatttttgaacggctgtcaagctatggaaagaggtgcggaaacctagcgccagcaacaatgaaccagcaaaagcaacgagtccaaaaataatgtggcctaaaatcaaccagttgaacatatgtgtctcccccttatcgtttgcggacaaatgccaactgcaaaagcccgtgtgtcatttaaaagtatgacgtcttaactatacgtgagactatcacccctgccaactaaatctttcgagaataatcacccggtaacatttcgcccgccacatggagttggccgtccttcaacacgactccatgatcccaaaaacggccaatatcatgccgatgtgaaatgacaatcatcgccaccggcaactgccgcaggaggatgccaagcgtctgtgccgaggccgcatcaagatttgcgaacggttcatccaaaagtaacatcggccgctgagccagcaaagcgcgggcaatcccgattttttgcaattccccagccgacacattgacaccatcttggccatgcacaagcgtggccagtccttgcgggagacgcgcaataaaatcggttagcccaacttggtgtaggacaagcgtcagttgctgatccgatacttgccggccaagcgtgacattattggccaatgtgtcctcaaataatgcaacaacctgcgggacaaagctcatgctgtttgctgatgccgccagatcgcgcttgtctgtatcttcaaactgaatcgttccagcttgtggcaccaataaacctagcatgaggcgaagcaaagttgatttgccgccaccacttggaccagttatcaacatcttcgcgtgtgcagtcacgtcgagctttaactgtagctggttcaaagtcggttgcgtagcatcaggataagtgtaagtgacattgcgaagaacaaatttagctggtttttgtcgcgactgtccacctgccaactcctctttatgcagcgattggatcaacggcaacaaccgtttggcagacaccaagttgcgcgtcaattcagcatactgacttggcatactgtaaaacaaccaagtaaaactcggtgtcaacatggaaaatgcagcaaattgaccaatggtgatgaccttgaagccaacaaatagcagctcaatgcctaaaatcgcaatgtcaaaaacgagccccaacgaaaatcccaacacaactgttttaacttgttgcatccccatctgatactgtgcctgagaaaacttctgataggcgccgttgaatagttgcataccaaactgttctttttgatagctttttaacaattcgcgaccgttcaaaatttgcaagaggctttcctgcatctgactattctcaatctgtcgctgattttgcgctgtttgtaagcgaccggacatcatcttcggaatcaaaagtgccgttgcacacagaccgatgatcaatagcgttagttgccaagagctgaatagaccaaatgttccagcagctaaaaaggaaaaaccaccaaccaccaaagccgtcatggagcgcatcaacaacggcgcagcagtctgcgcatccgtggtgaacccgttgaaccgccgcccgctagcttgattgtcagttgcaatcggcccattcatcaaagctgccatcaattgcgtttgaattctttgaatcaattgatactgaccgcgcgtttgcagctttgccatcacaaagcgacctaaccctatcaccaaagctgtagctgcagctaacgtgatcatgctgactgtaaaagcagcatgttgcatcacactttgaatcacttgtgccagtaataactcaagaccagcacaccccaaggccagcaaccataaaatcgagacaagtggactgtcaacaagccgccaaatttttttcaaatcagttatcatggtgatcacccaccttcaacacctgatcggccgcagtcacaaaatcaaacgtgtgcgtaatgatcacaaccccgcgcttcttagcttcctgccgcagcagttgcatgactgtttgttgattaaccgcatcaatgtccgaaaatggttcatccaaaacaataaatggacgatctgcggcaataccgcgaataattcctaatcggcgctgttcacccggagacaattgattaggttgtaacgtctggtcaagatcggcagcataccggtcaagttgcagttgctttaataatgctgacaactttgtcggatcagcctgagaagccaatagcaaattagccatcacggatgccgtaaacatcacactccgctgcggcacaaacgcaaacaacgatgctgacttgattttagcaggcacaccctgaatctcgattttgccagtcgttggctgcaattcgttgagaatcagcttcagtaaggtggttttcccagcaccatttgcgccgatcaaaaaggtgatgccttgattatgaatctgaaaatccaaatgttgtaaaatttcccgattcgtttgcggataatggaaactcacctttgtgccgcgaattttaatcgtatccggctgatagtcccccttcataggcgaaaatgctggcattacctgctgtgtcagtcgtggcaatacgcgatcaatagaggttcgttgctgagccaagaaaccaatcgtcggcgccaatcccaaaaatggccataggattgaacccacgccagcattccaggcacctaacagaccggcaactgaactaccagtgacggttaacatggcaaaccccaccatcaacgttaagacctcagccaaatagacgccaccattgaaaataccggcaagcgcgccagaggccgttgccatttgcctcatgcttggcgccgcttgctgaaaataatcagcgtgtcgttgacaactgtaagcaaacacattcagattgcgaaccacagcgacatttgccaaaaaatcattgaaaaacgctttgtgcttgtcatcaatttgaataaaagtcgtttgcgcttgattttgttgacaaaacaagccccgcgaaacaccggcaaataaaccgccgaatgctacaaacatcagtgccaactgccaagactgcgtcacgacataaatgacgccaagaaaaaccgtgatcccaaaatcgaccagtggcaaaaccccctgcatccagaaattgcatgatatgctgcgtgtccgttacgatcaaattagtggcagttccattatcgtgcacctgtgtcgcgtcgtcttgcaaaaagttagccatcaaagcggtcgcaatgtcaccactgactcgtcgtttgagacgttctgtgacaacgcctgacaaaaaataaatcccagtgtagacaaccgctgccgctaacatcccggcaaaaatggccacaagcaagttgacctgtcctgaaagtgcaacggtcaaaccaagctgtatcagcatcgaaattaaaacgttaaaaccatcaatcagcactcgtagtgtcagtaagccaagcaaccagcgatatcggatagaagtgattcgtaaaatagttcctcaattttcaagtcaagtgcaacgatgataacgaattcttgatagtggtctaggctgttacgccatgcatcggtagtaatcgcatgggcgaagatagttcagaatacgtctgggacgatggttcagtgcggattggactgcttgaatttcaaccagggtaattgctctgagagacttccctttcgggaagaattccctaagcagtccattggcgttctcgtttgtgccacgctcccaaggcgagtacggatgtgcgaagtaaatctgggttccaacaatctctgataacttggcaaactcggaaccattgtcaaaagtgatactctcaaattccttggccccgtagtcgtcgatcgtgtcctgcaaggctttaaggcaggtgcccgcatgatagtcaggaatcttgacgatgatctcagtccggctgtaccgttctgtgagcgtcattaatgctggctcatcagctaagcgaatacctttgaccaagtcgccttcccaatgtcccacgcctgtgcggtcattcacggccgcaggacgcaactcgattgagtcgccgtatatcttcttattcttgcgcttgtgggcgttcttatagcctttgatgcggcgtcggagcttcttgggaagtgtcatgttgtctagctcaagcagcccggcgtcgatgtagcgatagacagttgtcgttgaagggcaagccttgccctggtcgcgatagaagtgtacgaagctatcaacgctgtgtacgcgcggcttacgagtaagctccctggcgagagccttgaagaacgcacggccggtcttaagaaaggcgtagtgaccggttctatcgcgtttacggtcgtgcatggcttgggcagtttccgcaagatagacttgatgcgagtgacgcttcgagtcgagctgagttacagatccacgcgtgatttctcgtgagattgtcgctttactgcgatgaagcttctgtgcaatcacggtcgcggtgtcaccagcagcctgaagggcctgaattgtagcacggtcgctaaaactgagttgttggtaatgcttgtgggtgttagtctgagagtgggtcatgaagattcctgctttcttgtttagctagcactaacaagaataggtcttcatggcctttatggtctagtcgtcagggtgttgcacttgaattgtaaactggggctattaatttaggcttaattcgattgctttcatggtcgtaatgatcctgaagatctgcatcattatagccatatcccaaaagcagatagccagcagctttatctatagcctgattacacttggcataaaccgtgttgaacggttctcgacgttcatttctccatttgtttttcccgggggtaataatgtctggtgttccggtgctggcatgttgaaatagatatgttcctcctccctttttagaaaaccaatcgattgatccgtgaggctttaacaataaaatgtagttattatcttttacagctacaatgctatttcgcttaacgcgtttcaattgttggtgttgttcatcatataggtccggatcaaatttccgaaaatagttgccataaaataaattatcaacattaattccaagagacagacacgtatattcaatcaaacaatcatagttggttgttatgatagttaaaggcgtattatttatgggagtatactgcctcaaaatccggtacaggttaagttgtcgattgttttcaaaaacctgactaaatatctcagagtcctttgcagcgattaatgaatacgtagattgaataatcagattttcaactactggagaaacctctttaactgaaagagcaccttcaaggttcgttcctttttgcagttcgctctttacggtattccagccttcaagatccgacgacttaagtccttgtagattactaagcttctgatctacatcaacaagaagatgctctgccaatttccccattcctggaatcccttcgccagcagagattcctgagccaatcgtaataagcgtctgttcttctccaaattgttgtatatattcgtatactcggtcaataccttctcccacagcaccagcctcattcctcgtatagattagttcaattataatcgctaagcctaaggatagatagccttggctatgttgcttaaaatccaatattttcaattatcatttaatgcctccacaccgacaagcgtcggtaactaacttatcgttctcagtccaacaatgattttgggtgttctaaaagattcgattgtcaaaatgtatcaattaatatattttattttattaatcatgttgatttttgaagggggctctgtctcacctgagataagtctctcaataaattaattttatattagcacgataaaggttacaaaacattctttaacaacagatccggcaaatctacctctacaaaataaccctctcaaaatgtaccggcaactcatcaactcaaatgaattccagacaaaataaaaaagctgaagcatcaacgattttcttcattgagcttcagctaaattcatttaaattttgtaccggtcattcccactcaatcgttgccggcggcttggaagtaatatcataaaccacccgattaacgttcttaacttcattcacaatccggcttgagatctcctgtaagacatcccagttgatccgggcaaagtcggcggtcatgccgtcaattgatgtgatggcgcggatgccgatggtgtagtcgtaggttcggccatcgcccatgacaccaacggatcggaagcctggtaagacggtaaagtattgccaaatgtctttgtccaagccatgcttagcgatttcttcacggaggatataatcggaatcgcgcacgatttcgagtttatcttcggtaacttcgccgatgacgcggatgccgaggcctgggcctgggaatggttggcgccagacgagggcgtggggcatgccgagtttttcgccgagttcacggacttcatccttgaagagtttgttcagcggttcgattagcttgaacttgaggtcttctggcaggccgccaacgttgtggtgagacttaatggtctgagcggtgtcggtaccggattcaaccacatcggtgtagagcgtgccttgggctaagaaatcgatgccgttgagcttggctgcttcttcattgaaaacttcgatgaagtcgcgaccgatgattttacgtttcttttcaggatcagtaacccctttgaggtcgccgaggaaacgatctttggcgttgaccttgatgatgttcaggccgaacttgcctttgaggctttccatgacttgatcagcttcgcctttacgcaacaagccgtgatcaacaaaaatactggtcagctgggtgccgatggctttgtgcaggagcacgccgactacggatgaatccactccgccggaaagaccgaggagaacgcgcttgtcgccgacttctgcccgaatcttgtcgatttgtttggtgatgaagtcgtccatgctccagttggcttcagccttgcagatgtcgaaggcaaaatggtggaggatttcatggccatattgcgtattttgaacttcagcatggaattggataccgtagaatttacgatcatcgtcatccatggcactgattgggcagttgatgctggttgcagttcgccggaagccttctggtacgcgggtcacgaggtcgccgtggctcatccagacggtttgatcttttggcaaatcgcggaaaagcttggcgctgtcatcggtgacttcaatgtccgctttgccgtattcacggttatcagccggttcaacatccccaccgagccgttgtgccatcagctgcatgccataacagacacccagaatcggaatgccgagcttgaaaagatcctcatcaacacctaacgcgccttcgtcatacacactgttagggccgcctgagaagataatgcctttaggcgcaatcttcttgacttccgctgccgtgatcgtatgaggctttaattcagagtaaatcccaaattcccggattcgccgggtgatcaattgattatactgactgccataatcgaggacgatgatcttgtcgtaatccttgttctggtcatttgccacagtccgccacactcccttgtttgaatgcactaattttacagagttttcacatgtcggtcaatcacgggtgagaagcctctcatctaagcgttgccagcgataggcttcggaaaagccaggcgtgtccgacactgctaaccagttgtttatcaactgacttatcagccatatcttaccattttcgcagcgaaacttggtcaatttcatgtcccgttgttttgtgcaaaataatatcagcacgatttttggtaggcaggatgtactcattcaggttcttgaggttcacatcgcgccaaacttgccgcgccattgcgaaggcatcggctcggtcgccaatcgcgtattgatagtaatagttgttcggatccgtgaaggccgtgtcgagcaggatgccgaaacgctccagataccattgttcaatgaggtcaggattggcatcaacgtaaatcgagaaatcaaagtagtcgctgacgtagattggctgcttgcttggcagctggagcacgttgatcccttcgacaatcagaatatctggtcgatcgatcagttcatattcgcctgggacaatgtcgtaaatctggtggctatactttggtgcacgcaaagcgccgctcgcatttttgacgttgttcatgaaatggattaaaagttccatatcatagctttcagggaagcctttacgatcaagaattccccgacgttctaactcagcattaggatataaaaagccgtctgtcgtcatctgttgcacgcgtttttccggataagcccggctcagcaacagttgcagcaagcgcgcggtggtgcttttaccaactgccaccgatccggcaatgccaatgatgaatggtgtgtgcggatttcgttgcatccctaaaaagcggctcaaggtgaacatatcgccttgataatcctcatagcggatgtgaatcaggtgtcgcaatggtgagtaaatcattttgacatcatcaagactgatttcatcattcaatgatcgcaactgcgccaactcttcatcagtgacattggtgaagttctgggaatggaattgcgaccattctgcacgatcaaatttatagtaattcatttcggattgcataacttaccgtttccttgcgtttaatgttctcattttagcatagaaagccccagttgttcggccaatccttttcttgacaacaaagaaaaaaatcttcacaatcaacctatcaaaacgacgcgatgccagctcgaacactgacggaggtgccagcaatgcttgaactagtaggcgagtttctcctttcctttttcattgaaccgattttagatggcgtaattgccccacttttggcgcccacttttaaacaagacagttccttacgaaacaattcactcagactgggcatcacgctcatccttaatagcgcgattgcaggcggtggcggctggttgttgttcgaatccgcgacggcctcaccggtttctggggtggcgatcatcgtcggactaagcattttctcgcttggcttcggcttaatcgtgcgtgctatcattaaatacggtgcttacatccgcaagttgcgtcatattcggacggccaagcgtgatgccgaaaagccttatcaggaactttaacattgagggagtacgcatttgcctaacaaccaaggaggcacgctgaatgcttaaccaaattggaaaatttattttatcgattttgctggcccttttcctcgtgccaacattccgccgtagtccatcaccgttttggtactgggcatggtatatgttactggtcattttttgtgtcagtggcactggctttggtatctggctgcttgtcctcgcgcggtttcgcaccacggccggcattatcgtctttgttggcatcttattgatagtgttgatgccactcttcttaattcgcgcgtccacccaatttaatcggtatcgccatcgtagtcaaaaataggcaaacaaagagcgctcttcatcgagcgctttttgtctgccttcaattggtgccagtcatcacctagtcgtgcaaggtgaactgtaacttcatttttggcgctgctgccgccaccatttgacctaacaactcattgctgttggccatggcgatcgttgccatctgctcattggcagctgtcagatgatcgccaatatccttggcatctttgacagcttcatcagttgtgagctgcaagtgccggcaagcggcgactgttttttgttcaaaaacatcttcctgatctttaaataaggaaaagtcgtagtcaccaaacgttgctaacaggttgcttagccagtacattttcgtcacatcgaacttgtcgccggtttcgcggtatgctgctggtgtgtcattgacattagcgtaaaacggtacaacggcattaaaggtgttcgggccaaatgccaaccagtgaatgccggcaactgcagctggcacattgttgcgaatctgcaaaatgtgtagttcctgattacggttgatgccgattggccgataaagcttcttctgtgctggcgtgcctgtcgtgccgtaaacatcgtatggcgtattttcatagtgggaactttccacaaacttcacgtcttcgatgctgatttttttgctagtccggcaaatgaatggcagatcctgatcgatcggtgtcgtatcgaattcagggttgaagtacttctgaccgtaccaagtacgtgggttgttgtaacgggtatccttgatcgtagcggagccgaaaatgtggcgcaagttgtacccttcagtatctggattcaggtgataggtttcaatcagatcgcgcagatcggcactactcatcgtgtcatcgctagcaaaatcgaaatcggtgatattgaagcggttcggcgccaccacataggcatcgtcgggaattcggatggctgcccaatgatgaccgccaatactttcaaagtaccaaacctcatctttgtcagcaaatgcgatcccgttgctttcgtatgtgccatattgttcaagcaaactgcccaagcgttgaaccccgtcccgcgcgctatgaatgtatggtagaacgatcgttggcatgtcttcttcgccaatccccgctgccaccagcggatcaacaccaaggacacggctattggttgtaatcgtttcggttgaggtcatggcaatattttcgctattaatccctgctgccgcccagataccgtggccgtcttctgcttccggggtggctgtgtagcccaagggatcggctggcaaatcaatcgcgaacttgctgagcacggattgatagtgacggggctgatcttcaggtttcacgtacacgaacttctgcggatgcaatggtgactcaccgtcttcgtttcgggcaatgattgtggaaccatcaattgaagccttcttgccaacaagcaccgtggtacatgaaccgacatatcgttttgccaaaataatcgtccttctttcaaaatgaatccgcatatttgcagcactgtgcgggagttgatttatggtttactttaccgcgcgaaaacgggtttgccaagcgtgcccgaaaacaagtaacaaaaatagccatccctaaagtttaaccgccttgggatggctatttgtaaattcagagccgctgttgacggcgttgttggttcatagcggctagcgactggaaaacggtagcctttttacagactcatgtatcatgcattttaatggcgcgtctagtcaaactgttctggtctctggactgacgatctttttaaacttttcaaaatccaagctttcaatccaacggtacctcgccgaagctagcattgattttccgatagtcggcgcgtcgttcatcgtaaccggctagcaaacgcttttcaaactcagattctgcttcgaccggcggcagtgggccgtcttctttgtggcgggctacaaaggttgcaaaggcggtgccgacttggaagcgttcgccagtggctagatgttcaccaattaactgaatgaaaacttccagtgaacggtgacccacgccgctgaccatgcacttaatgaccagtgcatcccccattttaaccggtgctgccagatgcaccatgtccaatgagccagtcgctaaaccacggcggccgagtcgttgtgcggcaattgagctgacgtcatcgatccaagtaaagatctgaccgccaaacaatgtctgatgcgcattcagcatacctggaaaaacacgataactagaaacagctaaggtgtcatgcattttgaccatctgtttacccccgctcgtacaagtcagccggtactttgtctaacaacggcgtcacatcaggactagccagcatggttagtcgatgcatggcccgggacgccaccgtgtacaacaactcacgttcatcctcttcatggtaattggccgcattgatttgccaaaggacaacggcatcgaattcgaggcccttagccaaaaagcttggaacaacgatgacgccggctgcgagtcgttgattttcagacttgatcaaagttactttgatgccagccgccttcatttgttcataaatggcttctgcggcttccagcgttttcgcaatgaccgcagttgtctgcttcgcttcattgttaattttcaattgatcctgcaaagccgccatcaacccggcttcatctggacgaacgaccaactttggcaatggtccttggcgattgaacgccacgattttttgaccagatgtgagaatcgctttcgtaaagtcggtgacctgtttggtagaccgataactttgggttaactgcacgacgcgggttttttctggatcaaacagcttgctggtttcgttaatcagcgtccgcgaatcgtcttttgtgaaaatagcctgattgagatcacctagcaacgtaaacttcgcccgcgggaagctgtccttgaggtaggcgagctggtatggtgtgtaatcttgaatttcatcaatgaagacataccgcatctcgcgttcaccatggcgaccagtgatcaaatcatacaagtgcagatatggcgttgcgtctgccattggcagttggcgttccttaaataaggtaataaaatggtcgacttctgcctgccagtcatcagcgctaatgccctcggcctcgaggtcataaatagctggtacttcacgcaagaaactaacatactgtccgcgaatattaaggaagcgatcacggacaatatcttgttgaatttcgttgaagccacgcatcaccagttggcgggcgaagaaccgatattcgtcatcactattcttaaactctttcgggccgtcttgttgcatggagcgaatctcttcaccgcttagattttcaacggcttcttgcacccactgcgatttcatttcggattcaattttccgattgagcattttgatcagccgttccttggtggcggtcaggcgattgcccatgtgataattttcgttgtaactataaaagatttcatgaatccgccggcgggagaagaatacctcaccacggaagcgaatgtcacggaagcgcaagcctgatttttcaagacttgtcgcatatttcttggctgtctcaaaaaagtctaagctgcctttgacacgtgcaattttcttttgaactggggttagttgttgctcgaactgagagaaaaggttttggacatcaatgtgtggtaaccgtcgcgtgacatattggtaataagtgaattgcaccatgttctgttcgccaagttctggcaaaacattgctgatgtagtcagagaaaagttggttaggactgaacataatcacctgactactactcaggttgccccggtaccgataaagcagataagcgacccgctgcaacacggcactggttttcccggagccagctgcgccttgcacaaacaataagtccgctttggtatcacggataatctggttctgttcgcgctggatcgtggtcacaatcgtcttcatttgggtgtctgacttttcgcctaacacttccagcagcatctgatcgccgatggtttcggtggtatcgaacatcgtctgaattttgccgtttttaatgacaaattgacgcttcaaagaaaccgtgacctgttgcgggccatcgggcgtttgataggtaaccttgcccaaaccgccatcatagtaaattgagctgatcggcgcgcgccagtcgtagatgagaaacttaccagcttcattggtgaaggaacctaagccgatataaatcgtctccggcttttcccggccttcttggaaatcaatccgcgcaaaatacggattgcccatcaaccgcttaacagtcgcgagttgctgcgcgctttgtttccacgcattggttcgctcatcaagcacgcgttgctgttgctgaattgaggccgcagtttcaatcgtttcagcgtagtcggtgaagttcaaggaaaaatcattgaagaagttgtcactgatgttcttctcttcacactttgtcttggccatctcttttgaaagacggctttcggcaccggagagctccttcatgatgcctgtcaaatgtgtctgctcttttgcttgttcgttctcagccacgacgtcatcccctttaacggttactaaataatcgttataacatcttatcacttatgcgtctttgtagcaaaagagcttgagtagaagagactgtagcgcaatctgattctattttaggcgtcagaacaccgtaagtccgagttggctacgcggcgattcggggtggcgaccgcgaagctagagtggtgggcacgacttcgagccaacgcgcaagcccggcgcgccgtctcgaagctcggccttggtctaagcggagaaaaccgctccgctaagaccaatttcaccactgagcccatcgccgctccgccaactcttgcattctatcctcgaaatggaatcatcttacccgtgataccgccatccaaattgtgggaagcttaaacaaaaatcatggccaccaaccaaacgtaaatcactattctcatagatagtctcatagatagataggtgagatttaaagatcccagtgccaaggcggatcaatcgtaggccagatggggttcagccgtgcaaacaacacagcgaccgggcttggagctgatgttgttaggcgacttcgagaccgcgggctttgcgggctcgaagcgccgtctccgctctagcttcgcgtcgccagccccagctggccggagattgcggagtttggcacagcagtaaactttttaggctgctttattctaactacagtccgggattcttaaaattttccccgcaacaacggcgtccatgcttcaagcacgtaccccactgccaagccaatcgcgacgcctaataatatttgcttgaatggtaagctaatcaaaagacccagcaacacgcatgtaccaacgatgatggagcgtcgattgaagaaacgctggccttgtttttttgatttattattttgtgacatgatatttcctttcttttatccgcacttttcgttaccattgacccatctattatcgctgattggaggacattatggaatccatttcgttattaattgtgctcacggcggcgtttttgacgccgctgctgatggcacattttcatattaatagtatcccgactgctgttgcggaaattttggttggcattgtgctgggcaaaagtgtcttaggctgggtcaggactggtggtgagatgggctcgctgagtgagttgggtgtcaccattctgatttttctttccggcatggaaattgacttctcgctgttcaagccccagcccaaaacaactgatggacccaagcagccaaacccggtcatgctagcaatcacgggattttcgactatcatcgtgcttagtctcggatttagctacttcctgcaactcattcacttctttaactatccgatttttgctacgattttgttcaccaccatcgcgctgggtgtcgtgattgccgcgctgaaggaaaaagagttgctgcgtcagccgattggccaaactattttattaattgccgcccttggtgaagtggtgccgttggtaagtttgacggtttactcagcgttagcaggcaaatcggatcgtaatttgtggctattattattgttgctgcttgccgccttattccttctaagccggtttaagcgcatctacggcttccttgccaccattgataaaagtacgacgcagttagacattcggctggccttctttctggtttttgccttagtcaccgtggcatcacgggtcggcgccgaatcaattctcggtgctttcctagctggcatggtgatgaaactgctcggtccccggcaagaaacgcaggataagttgacctcattaggttatgggttcttcattcctattttcttcattgtcaccggcgctaatcttgatctaaaagcactggttgccgacccaaaaagtctttcattaattccgctagtcctgatcggattctttattgctaagattggcttgatcccagtgctgcgccgtcggtttaagcctcaaaacgccttggctggcggtttcttgctgaccacgaccatcacgctggtcatcccgaccctgacagttggccgcaatctcgatattttatcagaccagcaatccggcgcgttcaccctcgccgctgtcattgcctgtgtcgccggtccaattctcttcaacacctttttccagccggaaccggaacattttaaaaagacaaaagtgaccttcatcggtggcaatctgctgacagtaccgattgcccaacatctcagtcctgatcgctatgaagtaaaactgttgacagataagccagaaaattaccacacgtataattcagaaatcaacattgccttggcagcctataccgaatccgctttgaaagccgctgatgcttatgactgtgacatcatggttcttggcgatttcgatgccgacaccaactacgatctcgcgaccatggcattagccgaaaaagtgccacggatcattgcgcgattcgctccaaaagatgctaccagtgatcgctatgatcgcttgcgggcccaaggtgtcgaagtgtttaacgccttagaggcaaatgttgctttgttgcggagtctcattgaaacgccgtcaaccttgcaaattctggatgacaccgttgctggcatttacgaaatcaccgtgcgcaactcgcgatttgctggccttgaattgaaaaatctgccatttattgatgacattaccgttagtcaaatctatcgcaataaaaagttcgtcgcaccgcatggcgacacccaaattcatctcggcgatcatttaatcttttccggtgacaaacacgtgattcgcgacattcgcgaacaagtcgagaaattgaattaaagctcaccgcatcgcgtggtacaatgagattattctaagaaaaaaaggtgatcaaatgaaacaagggacaacaatcctgaccttagacaatgggtatcatttgtggaccaacacacaaggtgaaggcgatatccatcttctttgcttgcatggcggccctggtggcactcatgagtattgggaaaactttggcgaagagctggccgatcttggcgttcaggtacatatgtacgaccaacttggctcgttttattccgatcagccggattataccgacccggaaatcgctaaaaaatacctgaccactgactactttcttggcgaagtagaagaagttcgccaaaagctgggtctggatcatttttacctcatcggccaaagctggggcggtgccttaacccagctatatgccctgaaatatggtcagcatcttaaaggcgcaattatctcttcaatggtcgacaacatcaacgaatacgttgatcatatcaacctcgtccgtgaagaagctttgccgccgtcagcggttaagtacatgaagaaaattgaaaaagctggtaactgggacgacccgcagtatcagaaatatgtggatgtcctcaatcgcggttatgttgatcgcaaacagccaccagcaatttcacacctgattagcaccatggccacgcctgtctacaatgctttccaaggcgacaatgagtttgttgtgaccggtaagttgaagaactgggatatcagtgatcagattcacaatatcaaggtgccaaccttgctcacattcggcgaacatgaaaccatgccactgaagtcagcccaacgtatggctgaggtcatcccacacgcccgactggtcaccaccccagacggcggccaccatcacatgattgataacgccccagtttacttcaaacatttgaagcaatttatctctgatgtcgaaaatgggacttttaacgactaatatcaccgaacgcgccgcagttagcgacgcgtttttctgacgaaggagtatgaaagcatggcttatacagttgattttaaaacggtcagcaccattggtcttgaaagctcgcctgttgctgcagcattggcaggattgcgcgcaaatgaagcgcgttacatctggaataagtataaggaaccttatatcacttatccggctgccgaaaaacctgacagtctcgcgtgggttaatgaaattctcgccgaacgcgacttgcaaatttccgccaagtctttggaagtcagcgatttgaacttaccggatttgcactgggttgagatttactatcaagacggattagtcatcaacgtgatgtatagcctgtccgaccccaaaaaacgcgcggttggctttaaacttagcgatggcatggcggtgccgactgagcttgaaggcaagtttacatttgcccggcaaaagtcgaaacttgcgggcaccattcgggggtcttttttcgtcatcaagggcagccattgaaaaaagacaactttttaacttgataagcttacacatacaaaagacggccaaggtgatgttcctcagtaatggaggtatgacatcaccgtggccatttttgcgtataatcgtttaaacaaagactgaaatggccagctgaatatttagaacggtgatcacacccgtcagaaaatagccgacccaccgcacgagttgcgaattaacgtggatacccatcaaatcacgccgattcgtcaaggccaccaacgggaaaagcgtaaatggcaaggcaatgctcaatgacacctgtgcatagacaataacttgctcaaagttgtgttcgctaaaaccgatcatgaagccaatcaccatgatgggaatgagcgtcacaagccgcgtcagcaacctccgctcccacaatggcatgcgaatgttcagataaccttccatcacaatttgtcctgctaaggtgcttgcaatcgagctaatcaagcccgtgataagcaacgcaaatgcgaataatgtactcattaacggactggccagcccgccaacaatcatcggatttttcaacccattatagacaccttgaaaagccgtcacatggcctcccacgccataaaacaacgctgccccaagaatcaatagcaaggcattaatcagaaaagcggcaaatagatgcacattggaatcccacttaccaaaccgcagtgcctcggtcacctgtgccggaatatgctcgtcgtatttgcgactctgggctagtgaagagtgcaagcaaatgttatgtggcatgatcgtggcgcccatgatgccgagactgagcagcaacatgccatgattcgtcaggatgtccgtatgtggcacaaagccgccagcaatcccgccaattgatggatcggctcgcgcaacttcaatgccgaaaatgatgccgactgtaagaatcgataccagcacaatcaactcaattcggcgaatgccaaatcgtaagaataataaaacaaccagcacatcagcgatggttaggagcattccccacatcagaggcaggccaaacagcagttttagcgcaatcgccgtccccacaacgccagtcatatccgtggccatcatagctgcctcattgatcaaccataagcagatgcggctccagttcggaataaatgcggcaattgcttgggccagatctaatcgtgcgaccacgccaagtttaatcgccagcgtttgcatgaacatggccaccaaaatcgacatcaagagtaccgatagcaaggcgtagtgataccgactgcccccttcaagtgccgttagccagttacccggatccatataaccaacagcaaccaaggcacccggcccgctgtatgccagaaacttctgaaaaaacgaagattcataaacactcggcacctgcacgctgcggttaatgtcatcaagactgcgtttttcgcgttgcactgttaagcgttcatcaggccttgccatggttcgcctccgccgcaatcttatcctcagccaacttagctaaaaagtcacaaaacggctcgcaaccattcatcggtcggacagtcgcaaagtttttgccgccattagcacgaaatgtttgataattctggacattattttcttccagtgtttccaaacaatcagccacaaaactcggggttgccactaacacattgcgcttacccaaagcagccagttccattaaccgattgcgtaaatatggcttcaaccaaggaaccgggccaaactttgactgataacacatctcaaccttagtctggggcactttcttaagatactgcttcacacctgctgtggtcgtttcacattcctgctgatacggatcaccatgccgcaccatcgctgtcggaatgccatgatagctcagaataacggtatcatacgcccccgcttcataagcatcgtcgatctgttgcgcaagaatcttttgatagtctgaatgatcataaaaacggtcaataaccacggtcttcacgcctgaagccgcgaccttatccaaaatagtcttcgtcgtactttgcgtgtattcaggaaacagcgggatcaccacaatcggcgcatcaccacgcgctgccatcgtctgcagcgtttcgccaatcggatactcgccgccatagttcatcgccatctgcacatcccagtcaggcagccgctcacgaagccgatcccgggtcacctgcgtataggcaatcaatggcgagccagcttgggtccactcatgcttatagaaagttgccgaccgccagctgcgaaagggtaaaataaaaccgcgcaaaatcggttgccacaaggctttaggcattgtgatgacgttctgatcactcagaaactcccgtaaataccgccgtacatcctttgtctccggcgaaactggcgatcccaaattaacaatcaacaacccttttgccatcctgctacctccgcatgtgatccactgaataattaaagaatagcacacgttggtactgattgcggcgttgttcaagatgctctttaagcataaccaccatgcttttctatgctaaactagtcttagcaattaacttccgaggaggcagatgaatacaatgaaaggcatcacagtctatctggtgcgccatggtcagacatggttcaaccattttaataaaatgcagggttggtgtgactcgccattaaccgataatgggattaaagatggtactaaaacgggtgtcattctacgcaacgtggccttcacacacgcttattgcagcgacaccatgcgagctactcgcacggccgatctcattctcagcaaaaacgtcactggcaagattccgctaaccgtcacccaatactttcgtgaacaattttatggctattttgagggtgaagattctagcaaaacttggtatgaagtcggcttcccgcatggtgccaagacctatccagaaattttggaaaaatatggggttgacgcctcaaaagacttcatgcacgatgctgatcctttccacgaagccgaagatgcgcgcacttattggacccggctgatgaaaggcttccgccagttgcgggccgaaaaccatgaaggtgataaagtcctgatggtcagccacggcacgaccattcgcagcatcgtcgataagttcggcaaaaatgatgggtatgtggtcaccgattcgcctcgcaacggctccatcagtaaaattcttttaactgatgaaggcattaaagtattgagttataacgagtttgaagcatagtttgtccaaaccgaactttttgccacttttgtattgtcgagcaaataaaaatgccctttcagacaaaaccagtctctaagggcatttttatgttgttcatctgtcaatagatgtctgcacacgacgttttagccggttaactttaagcgtccaaacctgctatttttcaagaaaacaaagatggtaggctcaaacttcttgccgtgccaaactccggtctttaaaatcacaataataatccatgaacaggtaaaagcgaacaacttcccgatattagggaaattgttcgcttttaattgtcagctgagaattatgttccagcctatagtgagacctaaaggatcttttctttaggctttttccgctaagttcttattgatcacaatgctctggtacatccaaactgtcgccagataatagagtgcatacagaacgatgaacaaaccgaatggtaacgcaagatgcccgtatggtgcgcgcaacatggtcttaaaaagctgaaggccaaacaagacgtggataatgccaacgaaacctgggagtaagaacaaggctccgatttcttgccgaattgagcgtcgcaatgcacgcggtcgtgccccgattttctgcaacatcagataacgactcttgtcataattggccccagatagaatcttgaacatcagcgtcgaagctaacatgccgaggaaagcaatgccgaggaagaagcccataaaagcgaggccagagaacatgctgttcactagcgcataaatcataaacttctgatcgccgttactgctccataatcgcggatattgcttgctttgcagctcgacaattttctgaatcgtgtcgtaattttgaccgaaatccttaactttaaacgtggtcaaagtttctgcattcccgagcttcgcgaaggtcgcggcatctgcgactttcatttgtttacctcgattattgccgataaaaataccaaaagaacttgggtaacgttcaatcatctccgcaaagttgtggctcgtgactttaatattcggcgtatcaagtcctccgtcattggctttgatttcaagcggatgagcgtcgagagcttgctggctgatgtaaaccgttttggcatccgatttaatcgtatagtcttgcttagaagtgacatcctgcaaccgactgatttgcgcacgggtcgcagcatttggcgaggcaactgttaaatcgtaggcggtcgcctgactcgccaaatccggaatatcatgcgtaaagccaaggccaacagtaatcgcccctaaagctaaggcaaacagcatggcaaccacggataaaatccgggtatagtcccgaatccggaaactcagctgcgacaaggtaaacgtatgcaactgtttggctgcaaacttgtggtttcgcttcaataagccaatcagcgcgacaaagactgagttaaacaggaaataggttcctagaacgatggtaaccaaggccaatggaatcgccataatcccgattttagcgatggcatacatgctgtagtaaccaaccgcaagcaaaatcagtcccaagacaatctgtaagacgaaaattcctttgcgttgtttgattcgatttggtgtctgcgcttgatgcaacaaccgtagcattggggttttcaatagttttccagcattatagaacgccgacagaatgaataagacaatgaagaagcctaatgtccacaatacggctggcagccaaaacgctgagaagccagttgccggcgcatgtagggtgttaatgagccattgtcccacaaaggttgtgccgaccatcccgaccaaaataccggcaactgttgctaaaagcccaattgccacggtttcaaggaaaatcagttgcgcaatctttcgcccttttgcaccgagcatcataaacatcgcatagtcgcgttggcgcatgctaagtagaaaactattggcatagacgatataaaccaacgtgataatggccaatagcaccgcgccgaagccaaaaataaatggtgtaaagccaatcggcgaatttttctttaaaaagcttgtgtttgtggcaagtgacatgaacatgtagaaaacggcgctggcgataaccagaccggagaataaaaccgcatagtcgcggaagcggttcttcaggccgccgagtgcaagtttcgttaacatagacgacgccccttacttttgaaatgtgccgagtgtgtcaagaatctcctgatagaaggcttcttgactcttatcaccatggaccagctcggaaccgatttgcccatctttaatgaacaaaatacggctggcataactagccgaaaacggatcatgggtgaccaacaagatagagacatcctgttccttattcaactgttccatggtatccaataactcacgggctgacttggaatccaaagcacccgtcggctcatccccgaacaggatatctggcttctgcaccaacgcccgggcagcggcaactcgttgtttttgaccaccagataactccgttggatagtggtcgagtacttcattgatccctaatgtttgggcaatgctatcaacagccgccgcctgcttcttcgcactcacattttgcaacgccagcggtagggcaatattttcgcggccagttaggttctccaacaaattaaaatcttggaaaatgaaaccgatttttttagctcgaaaatctgataaggcatccccttttaattttgtgacgtcagcacctttgatcaaaacggagccagaagtcggtgtatctaacgtactaaggatattaagcaaggtcgttttccctgaacctgatgcgcccatgatgccgacgaattcaccgggttgtacttcgaaactgacacctttcaatgcgggtgtttgtttttccccttttttaccataggttttcgtaacgttgtcaacagttacgacaggttgcttgtccataatagacctccatttgtatctttgtgttttgtttacaaactttatgatagcgggttaggctgcctttttcctgataatggcctaacggatggttgtttgtaacttacggctttgtaagctgctttagtctttctttaccttttgccgcaaaaccgccgcaatccctgatataatcactaatggcttttgaaaatatacatgaaagttgggtcgcagtgggaaaactccgtaataaggcgcctgggatgagtttaaaaaccagtcgtttttaaaccttcagatatttaaggagccttttatatgaatgaattagataaaccacagaaacaatatatcccttgggtagttgtcggcctcatggactttgtcacggtcattgggttcgatgacatcatttataacttccagaatcaaggactggtcgccttcaccagttggatcatcatgactttcttctatgtgattccttacaacctgattgtcgcgcacatgggctcgactttttccgagcatggcggtggcatcaccagctggatgcgtgaaacaaacggcgacactgtcggctactatgcggcttggttctactggattaccggcctgccctacgtcgtcgatgtcgccaactctgtcgtcatctcatttggctggatcgcaaatggcaatggcaacattcaagccaaccttggcaatgcttggtttggaattctgaccgccgtcattttcgtcatcttcatctggcttcagcatttcttcaaaaataaaagtctggaaatcatgtcaacgatcggcggtggcgcgatgtttatcatgaccgttctcttcgtggtgatgacctttgtcggtttgtccaaaggtgcaccaattgccacgcgcccctttgatttcaaagcttttattcccaaagatttcttctcacttagtttcttatcaactttcggcctgttcgtttttgcgatgaacggctccgagcttgcagcgccatacaccaaagacatgcgccatccagcccgcgacttccccaaggcattgaaaatgattgccatcatgaccatgtttctcacattattcggcactttctcgctcggcgtttatttcaacgctcatcacttgccgaatgacttgaaaatgaatggttcctattatgcttttcaggcaatcggtcgccagtttggattaggtaacagcctgatgtatcttttcgctgttgtccaaggcatctacatgttggcccaactagctgttattcttgacgcttcaacccgtgtctttctatctgacgtcgccaaacgctttatgccacggcaattaacgaaaatgaatgaagacggcttgccaatcaacggctattggatgaccacgatcctttgtgctttgatcatggcgttaggtgctttgctaccaaaaatcaacgacatctttaattggttgttgaacctcaatggcattgtcagcccgttgtcaacctgcttccttttctggtcttacaccatggttcgcttacatcaggatcgcttcccgacgccagcctatacttatctaaaaaatcggaaggttggcttactcgttgggatctggatgttgggaattacgttcctgcttggcacgcttggcttcttcccgacagatgcgactgcggagacgttcgctttaatgctggttttaaacattgtcgttccgattggcatggtggcccttggtgttttgatgccatggatcgcccaacgtcaacgaaaagcgagaaacggtctcgcatttggcagaacaacttggctcggcttcaccgtgatcattttgctcggattggtcagtgccgccacatatggcatgcatgtcaacctgctcaaccatctcaatccaatcttgcaatggagcatcatttttgtcgttgatctcgtcatcattggtgtcgttgccaaagtcaccgccaacggccgccgtcaaattagcactgactaaccgtttttaaattgaatcgtcactagctgcgaccgtcaaaatcatacaggcggtcgtctttttatccttaaaattatcaccggccagcatgcgctatcgttcaccgtgataaactagttaataggaggtgccgccatgctcagctatacgattatctacaacccggcgtccgggcattctaaaggaccaactgctgccgaacaactcaaaacgaaactggaagatcgccagcatcaggtcacgatggcgccaaccaaaagtgccgatgacgcgcgcgagtgcgcctatcacgcccaagcagacattgtggtggctgtcggtggtgacggcaccatcaatcaagttgtcgctggtctcgcaccgcgcaaaaatccgccactgttggccattttgcctgaaggaaccgttaataatctcgccaaggttttgcatattccgttactgttgccgttagccatcaaaaacattctggaagctgccccacagccactcgacgttgctcaggtcaataatcactacatggtcagcacgttgaccctcggtgttttagcaaatgcggctttatctgtgacccagaaagaaaaacaacacttcggcccgatcatctacctcatgaagggctttaaagttctggctcaacatcaacattggatcctacagttggatagcgccgatggtaagtggcaaaaagacacgcagttcctattaatcacgatgacaaactcagtcggcggcttcaccaacgccgtccctgacgctgcccctgatgatggtcggctgcacgttttcctcgcccccaaactgaccttgtggcgatcactactagcaatcccgtacttcatcaccggcaacttccaaaaactgcccggcatgacctactttgcgaccaaagagttgatcatcaaaactccgaaaaccttacaaagcaggattgacggcgatcctagtaccaaaacgccattgacgctgaaggtgattagcgatcatattcaggtcctggcaccgaatgttgggtagatttgggctaccgtgttacacttggtctaatgaaacgaaaggggtgaatcgccatgcggttacgtcaggcgcaccatgaatgatgatctgctagcaccgatccgcggcgaccaagcccggatcaatgaaaggaatttatgactgaacaattatccaatgaacctcaatcagaaaatgttttaattaccggtatctcgcgtcagcagcccgacttcgattacaccatgaccgaactcggcgaacttgccaaagcggataactacaccgtcgtcggcgaagtccgccaaagtctcgatcgcgccgcagccgccacctattttggcagtggcaaagtcgatgagattcgcgaacttgctgacgtcaaaaacgcaacgactatcatcatcaacgatgaactgtcgccatcacaactccgtaatctcgaaaagcaaaccaaactgcacgtgattgatcgaacccagctgatcctagatatcttcgctgatcgtgcccgtagtaaggcagccaaaacccaagttgaaattgcccaactgcaatacgccttaccgcggctgcatcccagcgccaaccggcttgatcagcaggttggtggtggtgctggttttgccacacgtggttcaggggaaacgcaacttgaacttgatcgacgggttctcaacaagcggatcagtcatctgcgtcgcgaactcaaagacgcgagtgttggtgatcaggtccgccgcgcccggcgcgaaggtaatgacatccccgtcgttgcactagtcggttacaccaacgctggcaaaagcaccacgatgaatggcttactcaatctttttgccgaccgtccggaagacaaacaagtttttgaaaaagacatgctctttgccaccctggacaccagtgtccggcaactcaccttgccagacaatcgcaagttcctgctcagcgacacagtcggcttcgtctcaaaactgccacataatttgattgacagttttaaagccaccctcgctgaagcagccaacgccgatcttttgattcaagtcgtggactactccgacgaaaactatccggaaatgatggccatcactgaaaagacgttgaaagaagttggcatcgaaaatattccgatgattgaagcttacaacaaagccgatttgcgtgaaggcacccgctatcctgaagtcactggccaacgcatcgtgtattccgcccgcgacaaaaactcgttggaagccctgacccgtctgatcaaagccgacatcttcggccaagacgaagaacacacctacctgatcccatttgatcaaggtcaactcgtcagttatctgaatcaggaaactgtcgtcaaggccactgactaccgcgaagatggcacgctcattaccgctgtcgtcaacccagtacaaaaaggtaagttggcccgattcgctgtaaaagaagaagtttaacccccttgcacaaaagaagagcaccaacggcaatctgattgccgttggtgctcttttctttttgtctaggttgctccggttagacacaccactagctgtccggcaaagaaacgcctgtcagggtctttattccaaaacgccaaatttataaccattgtcacgataatactgaatgatccgcggcaacgttttaaccgtcagatccttaccaagggcatcatgcattaagacaactcgcacgttactggccggataaacattcagggaacgtagatggtattgcagcatcgcatcctcagtcttcggctcctgcgccggactaagtgcatcgccgactgccgcatcccaatcaatccaatcgagaccaagccgactaagcgcgacatctgcggcagccaagcccttccagctaaaatgaccacccggatatcgccaaatatgactgcaaaaatccgatcccaaaacctgttggacagcggcttgggcactcttcgcttcattctcgattactgccgtggctcccacccgactaggataaagcaaactataatcgtgcgtcatgctatgtaatccaattgcatgcccagcatcatattccgccttaagaaccagcgctgtctctggactaacctgcttgccaacgacgaaaaaagtcccatgaacgccagcctgactgagaatatccaaaaccttaggcgaattaaccgtattcggaccatcatcgaaggttaaaaataccaccttctctttaattggacttgtatacggtgcatccatctcttgtttgacttgggcaactggataagcatattgattggcctcagcaatatgattttggcccacctgtgccgctttcgactgcgcctcttccctagaagcctccgctgctgcccgtcgccgagatgacacagccgcaacatgccgctttgatgccttcctcgccgcgtgccgccgcgaagaagccacagccgcctcatgctcactcaccgacttcgcgtgcgtcttgcttgctgccatggccgctgcgtgtcggtctgcgtatagtttaactgaaaagatggcgattacgattaggaggatacttaggaaaatgagccaccagtgccagttacgaaacttcctcattctaaaacctcacccatttgtcaattcacttccggaaatgagtgtatcgaaattgggtgggagatgcaaaggagaagttcgacagatcaaattttttaagggtggtagcatcaagtggtatgtaatttcaaaaaattgacaattgccatttcatcaaacgatatccaacaatattgactaattttttataaggaaagaaaaagcttaaaggtcccgcaaaagaagatggagtatgcagtcccctccgttttaccaagacgtcaatttgctggttgacttttacaagaagtcgtctaacatttttaaaggttactatacttttcgttctttattgtatttggcgacttacatttgggttcggaaattttatgggggaaaatatgataaacgagtcacaaaagttcttaaactttctcaaaaaaaagcgaaaggctgtctcattcttatttgcagttacattattactttatctaccaatgctcacaaacttcagctattcgattgattccgaggccgttgtcgacaattctaaagacttactattttcatggctgacaattgaccgctttggactggtagcgctcaaaaaattctttttgttcggccttgaccttaatccatattttattaatacgctgacctacctcttaatggcatttagcgcagtcattcttctatacataatcgatcaactgattcaaacaactccatggattcctttgctcgcggtcaccttatacctcgtttcgccaatccacttcgagcaaaatagttttgtgttacaaagtgttgaagttatgattggttttaacttgatgtttgtcggaatgattgcgttaggtatgccaggaaataaggtttcacccaagcgtctcatttttggtatgctattccttactgcaagcttttcaatatatccttctattgtcattggcgcatcaacattggccatcattattcttcacttacacgaactaaacaaaccatttgcaaccttctccgtctattttagacatcttgttcggtacattgcactaatcttaagcagtttgctgacctatgtggcgctcgaccaaatcatcaaatattttgctcatgcaccaaagaatagctatattcaaacagcatggggacatatggatacttctctgctcatgcaaatcgcattggccaagtttaaacagttttttatttttccaaatcaaccttttgaactctcggttgtaacatatttggcagtagtaacattcgctcttgttttaataagtggctgttgaactaggccaccatatcttcgacccttgtagtaaatttatagcgaatttgataggcctcaccctcgaatttagccaaaattaaaattggtatagcaaatacccttaacagggtcagcacattgctcaagacgatggccgcgtcaatcttgacggccagtgattcagctgtccgagtgttcaccaagccaagccccagcgtgcccttcataaaagcaaaccggcgttcaatggtacctcttcgattctcggcatcagtatcctcacgccgtttcgctgcatcaacgtgttttggatgccggccaagcttcggaccgcagattcggatacccaaatccttacacagctttaggttctcccgattacggtacagcgtatcggccagtacttcatccggataatgtccatgaaggtcgtaatagtggtctaaagtttccgcgaagtcttggccctcagagaatgcggtgaaatcaaaacgttcaatgtcgactacgccttcacttaacgaacagtcaatcttcgccccaaattcaactttagcattggccttaccacgttgaattgggcgaatgtacggctgttggagactaacaattcggtcttcaacgtggtgagtcttgtgggtatacatgtaccattgctggtcaaatagaattcgaatcacgcctaagcgaatcgcttgttcatctggtagagtcgcaccctgatcgatgaattcgttgatgtaccgcaaatcacggcgcacatattgaagttgggccttgacctgtttatgaaagccaccacgctgttgctttggatgtcgtgaaaatgaggtccaacaatgcttcgcctcgcgtttgtacatgcgtgggtttggcacaccaagttggtgtgccatatcgatcgccatcgcctcaagattcagccttgcttggttgaggaggacggtgtcttgaggatacttgattttgactggcactgcggttgcgtccgtgatgacggtgtccactttgaatgggaccaacgcttcgatcttggcgcgtactgtatcattcatgatattcgtaatcagctcggagatatcggcaattcgtttgcgaaagtgtgccaggctggaataattgaacggctcaaccgctttgtattcggacaacccgatgaaatattgaagtgcgggtgtatcacgaattgccgcaaccaccccacgatcagttaaacccatccgttgttggatcaggattgccccatagagtaaacgaaatggttttgccgcacgtcccgcatttttggtgaactccaattggtatgcctcatcgagagctttccagggcatgacctccgccaactggatccactcattgttagagctaagtggggtacttaaaccggcaccaaaggattcaaatgacaattgaagcgggctgtgacgatagaccatacgataacctccgagtaggttcccaaaaaatgcaaggaaaatgcaggaaaacagctaattccaatggatttattataccgcaataatgcatatattagcttaactgcctgaattatagaatttttaagcagccactaataatgggattaatccgtaagcagattcgtttgacaattttattggacattatcgctgagtacattttggttctcagcttattgatcctacttggcaacatgattggacctattcgttcactgacccctaccgtgccgttagtcatgattgtttataacctgacagtcatgaccatgatgccaaacaaacgcctactcttggttgtcggcatgagcttctcaatttttgcgcttatgctgagcaagacaacttctgatctagaacaaagtttcatcatcagttatgaaaacgaagtaaagttctcagacaaaattgtcaccagcgttcaggaattaggcattaacaactttgatcagtatagattagtcattgttggagaaaagagattcaattctcctttaactgaaatgggagaaatgattggcaatactcattataactgggatcttgactcgccaacaggaagcaatcgccgcgtgaccaattttctttcatcacaaggttacaaatttgcaactgttagtcctaccgattatcgcaaagcgcaaagaataagtttgaaaatgaaaacattccctgccaagggtggtataaagattttgggtaaaatgatcgtcgtaaacttaaagaatacggatatagttaactgaaacagtgggttaaaaaactcataacagtctttttctcccaaggtctaacttgttgtgaaactttcaataagaaacaaacttattatattatttgaaacgtaagaatggccatgaagttctccttgtgaaagagacctcatggccatttctggtgcttcatttagaactaaaccagttcatactcataatgtctgagccatttacaggtctcctacatttaaacccagcatgacttgtgtgtatattttcggggggcgatcaaattagaatgatatcgatccataataatacgtagcaccaatagcaatcaagttattaatgattgcaaaaatagttaaggcgcagaaactccatttaacaatctttttcagagatcgtctttcgtcaaagaagaaactaatctcactgtacataatggtaatagcatatatgagtacaaaatctataaaaaagaatattcgtgagcctgaagcgtatatagaaggtgagaatcccacggcaacgctagtcaataatccagagagaaacgccaccgagaggaaagttcctaacttaaggtcctcaaaggagtttatcagaactagtaaaataacaataagcatcaatacataggtgagaaaaggtatgtaactaacgaagtcaaagtaattgacagcatcaactcgttgttgcttagttacggccccgaaaagagccccaaattctggtgcatagatattgacgactggtgcaaaaacagtccttaatgcgataaagcttatgggaaaccatgaagccacatcaatcacgcgagaacgcttcttcgaagaaaacgcgacaataacaagcatcatagagaaaaagagaaagaagatgttattatcggtcaactccgaaaaggtatgattaaatcccattaccagtttatcaaaaggagtcatgcttgcaaaatcgagcattctaaatttggtctcaacaagtacccgctgcttatttcctggagctatcaatgctaaacctatgttggcaaagcaaatcgcatattgggttatcacaaatagaatacctgaaaaagaaattcgtcgttctatgagcatcatgactgaaaaatagctcaaaatacagaggtacattactccataggtctcaaagtttgttgcaaatactaatcctaaaagcataactatgccaattaaaaagctcatcttttcatgatgatatatcttgtaaagtgagatcaaagcaaaggttcctaacgctaatggccaaaaatagttaatgcttgtcgccatccaaccagcgccattcatcattgacaacggcacaaaaaataccaacgacatgatcaaatagttacgtttataattcgttaatttcattaaggaccatgtcagtaacatccacataagaatatcaatcatagcccatataattatatgcatattttgagagatcttcagcaaaactgcttctataagcactcgggatgtccaagtcgtaaatcgtaaatgtaaagtagcgaaaagtgttgttcgatccaaatagtgagaaaatgcaatagctgcatctcctgtatactctcgaataaacagatgttcaaaccctataaccaaaaaggtgatagctaaaaatttatatcgagaatcctcacgaaactttgcaagtatctgtttcatcatttcaaaccaccaatcttgtaaggaattccagtttttaccaatctagttttttgaccatcagcaattagaaagccgagttgatactctttgtgtggcatctcagtcatgtattttgcaggaatataaccgtcaaaaccactattttcgtagttgtatttgcctcgttcttttcgcatcttggcaacatcaacacgctccaccatcttcagaggaaaaacaaggcttttgtcgttcttatcgttatatagcaccaaacttgtcacatacttttgtggttcctcatttttcacataaatccagccagaaacttccgtataacctctattcttcaaaagtaacgattcaatactgaacttcacttgattttttgagagaaccgcgtaacgttccattgatgcagctttaggaaaggcgtagttttggtactgcataaatacgcatattccggcaataattactccacagcaaacaactaaccaagaaaatgcttttcttttcaatccgtcgctcatcttattcctcctgtataccattttaatcgttcagttattggtttataaagttactcgtttatttcaaacatcacttttaagtaaacttaggtagcaaaaatctgacagtcaataattatcagttatcactttacggttcctagactgatgattaaattaataattacaacttgctaagagaaatttacatccagattaccatcgtttaccactgtcaacaattataattcaaaagaaaaaaatctcccctcaaatcagcttcactgacaaaaaagaagggggagatatcatacttctttaaaaacaggaaacaatatcaatcaggattgcttagaaaacctgttgacattgaagccatcaaggctcatcgaatcgccaccgcaaacttcatataactataggcggtattaaacgccgatttgctgatccaataagtcccattttccggatcaacaacatgaacagattgattactataaccatcaacggtgacaacatgggcattgtcaatcccgcgaccccagttatattgatgccactgcggactctgataattcaaagtcacccaagcaacgactgggtttcctgaagcgacctggttaagaattccatctaagccactaccactgatgttagttgcaccgccgaagcgactgacccatggcgtgaaggcacttggaaagatggactgatagacccctgagacaaccgcgtaaggcatcccaccaaaaccttgataaggattaccgttggctgctatcggcattgtttgaaggaaactacggagattatagccagttgcatgtcccttatattgcaaggcttgtagcgcgctggctgcctcacaccccattggcgcaccggctgcttcctgactgatgaacgatacacccaagactttggttgtatcaggagtttgtcctgttaaactgctgccataccaggcaatcccttcgtaactccatcctcgaccctgcagcacagccgcttcatttgcattggtcgtataaagatgtgaaccgctcttcaaggaagggttatatagccgataaactggaacaccttgattaggatcagagtaaaatgcgaccccttcagccgtccatccgcgttgggtgctgagggtgtaatattcgctccagtttctcgtgtaaagatgatcatctagtgctggattatagagtcggtagatattgtcaccactgaccggcgcgtaccagctaatgccttcgtaatttccccagccacgagtgatcagctgatcacgttcggcggggttataagtaaagaaatgttcctgcgttctcggactataaaatcgataaattggcgttgatgcggccgctgataccggcaaccctggcatcaaaaataaaataaagcagattgctgcaaagacaatgccacccagacattttttcataatttgccctccagtgataattgttgttatttgttagtcgaactgacctcaacttgtatgcgattagcaagcgtgaagtaaaaacaactaaaatcattataacttgttttggtgtcgtcatgttagacaacttaaatactcatagaacaagttcgcgattttgaaatacttagctactgtattcgggcttgaaaattcaccaatcaaaaagcagcctctgaataagaagctgctcgctgttttgtgatgaacatttcttgatgattgcccaatcccctgtgccagtctagcaatcatcacacttatcatctgacaagatgtcgtctacttttcaatcacctgcaaaaattccttcaaagcatcctgccaagtctcaatcttgaagcctgtcgctttggtcttgcttagatccaagattgaatgccgtggacgccatgccttttgcgggtactctgcagaggagacgggcttcaccgtcacgtctttgtcggcaagaatcgcactcgcaaattcataccagttacagctgttgtcattggataaatgataaatcccataggccaacttttgatccactgcgaaggtcatgaattcggctagatttttggtccatgatggtcgaccatattgatcatcgacaaccgtcagctccttatgcgtcttagcgagatccagcatggtataaacaaagttgtgaccatattcgccaaacacccatgaagtgcggataatataatacttcttgaggtatttctgaacctgttgttcgccttcatacttggcccgaccgtactcattacgcggtgccggctgatcatcaacggtgtaaatatcttttttgtcgccatcaaaaacataatcggtgctgatataaactaaagtggcgtcaatggccgctgctgccttagccaaaatacgggtgccgtcaacgttgaccttctgattcaacgccttgccttcatcttcagccttgtccacggctgtataggcagcacagtggtaaatcagatcaggttgataatccttgaaatactgatcaaccgccttttcatcagtgatatccaagtcatgggcatctgtcccgcgataggcaatatcgcgggaatcaagcaaatgccgtaattcggtgccaagttgaccctgtgcaccggtaatcaaaatcttcatgtctcttcccctctacatctacaaactaacgaaacaacgattgaaaataatcatcagtcttgatctagcagggatcattgaccgtgttcctgatatttttcttcaacagcagctttttcatcttgccaccagtcacggtgttcggtgtaccacttgatggtatcggccaagccttcttcaaaatcggtgtattgcggcttccagccgagttcttcacgagttttggaggcatcaatagcataccgcatatcatgacccggacgatctttcacctgatcgtaatagtcggttggcttgcccattaatttcaagatgagctcaagaaccgtcttattgtctttttcaccgttggcaccaatgagataggtttcgccaatcttacctttggtcagaatgtcccaaatggcagatgaatgatcattagtgtgaatccaatcacggacattcttgccggtgccgtaaagcttgggtttgataccactcaggatgttcgtaatttgccgaggaatgaacttttcaatgtgctgatagggaccatagttgtttgagcaatttgagattgtggcccgcaccccgaatgagcgtgcccacgcatgtaccaacatgtcactagcagccttcgttgaggagtatgggctagaaggattgtaacggctgttaactgtgaatttctcgccaggaccttcgccatggccaggcaaatcctcacgcaacggcaagtcaccataaacttcatccgttgagatgtgatggaagcgcacatcgtattttctggccgcttcaagcaacgtataagttccgatcacattactatgcaagaagggatcggggttaatcaaggaattgtcattgtgactttcagcggcaaagttaaccacggtatcaacttttgccatccatttatcaactacttctttatcggcaatatcgccaaccaccaactgcacccggtcaccaagaagatcggcaatgttggccttgttgccagcataagtcagcttatcaagcacaatcatctgaacatctggatgatttttatagacaaaatgaacaaaattggagccgatgaaaccggcaccgcctgtaatcataagtttcattattaaatctccccgtaaacaaaattattttcagcatctttgagttgcggatgcttcttgtctttatcagacataattaagtgatctgtcgacattggccattgaatcccgatatccggatcatcaaacgcgatcccgcgatcagattgcggagcataaaagccttcaactttgtagcagaaattgacattaggcgtcaacgtaataaacccatgggcaaaaccctttggcacgaagagttgccgatgattgaactcgcttaaaatgtacccttcccactggccataggtcggggagcctttacgaatatcaaccaacacatcttcaaccacaccagttacaacccgaaccagcttggtctgggcatcaggcgccatttgataatgcatgccgcgtaaaacgccggcttcggccgaaagcgattggttgtcttggttaaaatcatttgtgatgcctgcagcaacaaacttatcacgcgtgtaggtctcggtaaagaacccacgattgtcaccaaaaacatcggtttcgactaatttcacatcttgtaacttggttggaatcacttttaaactcaaggttctgcctcctaggctttttcatctgctaagcgcaggatatattgaccataatcattctttttgagtggctgtgcgagttcgcgcaattgatcgcgattaatataacccatccgataagcaacttcttcaagacaggcaattttcagattctgacgtttttgaaccgtttcaataaagctggctgcctcatggagcgactcgtgtgtaccggtatcaagccaagcataaccgcgaccaagtaattcaacatctagctgcccacgttccagataggctttgttcacatcggtaatctccaactcacctcgcggtgacggtttgagatttttggcaatgtcaaccacctgattatcatagaagtacatcccagtcacggcaaaattgctggctggatgttctggcttctcaacaatcgactgcacatgatgatcagcgtcgaacgaaacgaccccaaatcgttccggatcattgacttgataaccgaagacggttgcacccgaggtcttcgccgctgagcgctgaaccaacttggacaacccactaccgtaaaagatattgtcgccaagaatcagacaaacagaatcgtccccaataaagtccgccccgactataaaggcttccgcaaggccgtttggtttgtcctgtaccttataagtaatgttaagccctagttgcgacccgtctttcagcagatcctgaaaacgatcaatatctcttggcgtcgaaatgaccaagatatcccggatgcccgcaagcatcatggttgagagcggatagtagatcattggcttgtcataaactgggaccaactgcttcgagacagcctccgtaatgggatacagccgtgtacctgatcctccggctagaatgatacctttcatcaaaatgatcctccttctaaaaatcaaatcagtaatggtttgctctgcagccacacaaaggccattcacaatgtacataataccagtttacgcttacaatctgaagtatctaaaaacagcacagatgcttctaacacaggattacaaacagcatttatttataaaacgagtcgtcacgcgcgttagacaactcctcaatctcttctacaattgtattcaaaaatttcataagattgatgcaactttgacgtaggttaagactccagtttttaaagtctgctgacactcctaaaaatcccgctttttaactaaaaagcgatagatcctttttgagttgcaaagccttgctattttttaaaaaacctccaagaagtttgttcttgaagggttacgtcacctaataccttcgagaaactggcgtaaaagtcactaacgcgtttcagtgccttctcgaatggtcttcattggatcaaggccagaaattaagaagacctggctgccttccgtccaagtgatttgattttggcgggtgtcggaggtggtgacagataaatcaaccgttccgtggctatctggcaccggcaatgcgttgctagcaaaccatgcgactgcctgtttagccagtggcaatgggtcttcgccattaatcgttgaagctctaacagtgatcgtccagcgcccttcctgccacgtcaggtaagtcgaccccgctgccccttgcttagttgcggaaattccatcgcctatcgctacttgtggtaatccctgagttgattgatcagcactaatttgcgcttgagcctgacttgcattcgcataagtcttcttttgaatagcaaattcagcattcacactttgtaaactagcgtcattatacgccaacgcagcattaccttgactgaagaagagtgagtagttgtgactgtccccagttccaagaacgttcagatattgattaggattgactgaataattagctggccacttaacctggcctagctggttatatgttgcttgtttcaaagccgcgtaccgctgctcagttgcatccgcagtcccgttagctgaggaggacggtgttgcgacacttgaactagaaccagatgcattgtctgtttttgaagctgcgctgcttcgcttgctgctcgttgatgattttttagcctgttttttggattgactagttctcacagagtcacttttactgctgctttgactattttgaccgcaacctgtggcaaaaagaagcagaacagcaggtagtaataagagtgtcttcttcatttttatacccccctatttggatatttatattatatgcttctatgaacaataattcattgccccaattaatcatagtcgcgaccattaaaaaagcatgaccgactcaagcgtcatgctgaaatcattgcatttgagtttgttaactcaaatgcgtaatatcctgttcaacaacaatatcatggagcttttgtcgcgctggttcaggatcttcctcgagtccttgagaagacaccttgtcaaacaaaatcttaatagtctgtagcaagatccgtgcatctaagaaaatactgtacgttttaatatacaacagatcaaactttaacttgctgtgataatcagaggcatacttcccgtaaacctgcgcgtaccctgtaatacctgcgcgtacgttgtgccgcaaatagtaatgcggttcctgctcattgaactgatttacaaagaagggtctctctggacgcggacccacaatcgacatatcaccctttaacacattgaaaatttgcggtagttcatcaagccgaaattttcgtaaatatttgccaactggtgtaattcgcgagtcgtgttccgtggccaaaaccggtcccgatttggcttcagccgtggctgacattgttcgaaacttcagaattttaaactcacgttgattcatggtaatccgaacctgcttgtaaataatcgggcctggtgaagttaacttaaccaaaattgccgttatcagcataaatggcgatgccactatcaacatgagaattccgacaacaatgtcaaaaatccgcttaagaaaagcactttcaggcttaattctaaattgagtcatacccatgacactctcatcttcaaagttcataaggttaggtcgcaacatcaacaaattatcgaacgtggatggcaacagaatcgttttctcatgcttaatgatgatatcgataatttcacgtcgagtctcatccggaagcccctttgttaaatagaaaatatcaaccttatcgataatggccttggcattctcgacaaaatgatccgagacaacataagtcaccttatgtttattgtttttggctgagttaaagttttccaaaaccgcaggcagttcatgttcatatgagagcactgcgaccttgtagttgctcgtgaaacggacatacatgtaataaatgaaaatccgccatatgccaagaatcagaatactcagtaggaatgaataaccaaggaccaaacgcggaaacgcaaacaggcggcccataaacgtgatcatggtcagccctaatatggtaattgtttgcgctaaaaccgtgttgaaaataatgtcgcttatacgcctattgtaataaacataaacgcctaaaaagaagttaacgaacaggaacaacagcgaaatataaatcgctgagcgctcgtacatgtcaaagttatactctggaatcacccggccaaaccgccagtaaaaggctaacaagatgcttaagttaaaaagaccaacgtcaccgatcattgttaacagtcgtttaaggccattccattcggcactctgtttcatacagcaaccctctcagtaattatctttgcttgaattgaaaacaagctcactcattatagcatatgtatgacattcctctatctaaagcccccaacactgaggtttctataaagaatttttcttcaaagtcacaccgatgagttagcctgaaaaatatcattcaaccgacgccacatacttcgccaacccctcagccagcggcgtatgcggcataaagtcgaactgatccagcttgtctacctgagcatacgagtcacggatatcgcccaatcggggttcttgataagtcgcgtgcagtgttttgccagttaacttttcaagctctttagcgacctgatttaacgaggtttgctggccatttgcaacattaaatacgtcgtctcgggcactcggtgtttcgagcaaaccgcgaatggcccgcacaacatcgcctacatagataaagtcacgtgtctgctcaccatcgccgaagaaggtgaacggcttgtcggcttttaacgcatccatcatgattgacaaaacgccgctgtatggtgatttcgggttttgctttggaccgtacacgttgaagaagcgggtgcagacaactggcatgttgtacagccgcccatagttaagaacttcccgttcagtagcaaatttatccaccgcatattgtgtcaacggtttaactgccatggtttccgctttaggcaatgctggtgaatcgccgtaaacggctgcagagctcgaaaaatacagctttttaaacgtgatttgatgcgtacgcaaagtttccagcatgctaagattggcctcttgattcaccaaatgcgttgcatacgggcgctcaacggaatctgccacactggcaattgccgccagcaaaacgatgtagtcaaatttaccgtcaatcagcaaacgggacatgaaatcatggtccgtgatgctgtgttcataaaaagtcacccgatcagagtctggaatattttcccgcagacccattgataaatcgtcgacgatggtcacggtgttcttcgggtcggttaatagcagttcggttaaattggacccaataaagccggctccgccagtcactaagtagttgctcaaaatagtttcctccattatggtggcttcattttcttcattatcgtatcacagcttctgtcatgtcaccgccacttactgaaaatgttagcaaaatgataaaaagcgccgctgtctagcgccgctcctttactatgatatttttttaagctacattgatcctaattcgactgcacgagccgccgatccaaccaacgacttgccagtgacaaggcaaagttgaccacgaagtacatcactgccagcgccacgaacatcgggatcatatagttgatattctgcccataaataatttgcgcgtggtaggttgcttctggcaagagaatgatggtggccagcgaggtgtccttgaccagcgagataaactggctgacgattggcggaatcatcttcttcaaagcttgtggcatgatgatgtagcgcatggcttgatagaacgtgagcccattgctgcgagcggcttccatctggccacgcggcaccgcgttaatgccggaccggacgatttcggcgagcatggccgattcgaaaatgctcatggcgataatcgccgcagcgacaacattcaagcgaataccaatgtcaggtaaggcaaaataagtgaagaacaaaatcagcagtaatggcagatttcgaatcaaatcaatcacaaaacctacaattgctgaaaaatatttaattttcacgtaacgtgctaggccaagaatcacgcccagaataaagctaaagaatatcgagacaatcgaaacttccagtgtcacccctagtccttgaagcaggtaacgcaggttaatccatgaatacgcgtcaataaaattatgcataagccctgctcctttctaggcggtgacccattttttctcaagatatcgcatcagataacttaatggcatcgtcaacacgaggtagaaaaccccaacaatcagatacgtatcaaaggtggaaaacgtcgtggcggcgatcagtttgccttggtacatcaggtcaaacccagcaacaaaggcgaggacagaactgttcttgaccaagttgatgaactgattgcccaatggcggaataaccattttaaaagcttgcgggaaaataatctggatcatcgcttgattgtacgtcataccaatgctacgagcgccttccatttgcccgcctggcacagcttcaatgccggcacgcaccgtttccgcgatgaatgcactggtataaatcagcaaaccaatcgtcccagccgtaaaaccgtcaattttaacgatgaactgcggtacgatcacgtaaaaagccaatgtaataactagcagcgggatattccgcactatttcaacgtaaatgcgcccgatcacccgcaaactcttgaatggcgaaatttctaggagtgcgaacaaggtgccaacgattaaactgccaatcaaggcgagaatgctggaagccagtgtgtaaccgacaccggacataaaggttccccagttattggtaagaattgaccacatgctattccacctccttgagactgaagcctggcacatcaccaaaccacttcttaattaacttggcataggtgccgttttgcttaagttgcttaatcgccttattgacagcctgcacaaatggtttttgacccttgttgatcgcaatcccataaggctccttcgtaaaggttccgcctgtgacgatataatttggatcttgttcggacatcccataaagaatgccgttgtcagtcgtgagtgcatcgccctgccctgatttcagcgcagtaaaagcctgcgcataatcagacaactgcaaaacggtggtatctggcgcggcttttttaacgttgtcaacggaattggagccttgcaccccgatgacttttgtccccttcttcaagtctttgacggacttaatcgggctgccttttttaaccaaaatactttggccagcgttgaagtaaacatcggaaaaatccaaaatcttttgacgttctggcgtaattgtcatcgttgcaatcaccgcatcgacgttgccgcctttgatcatcggcacccgagtatcactggtgacctggaccagttgggccttgcctttgctaccaaggatctgcttcgtgattgccttagccatatcgacatcaaaaccttcaattttaccggttttgatatccatcagtccaaacaaacgggtgtcagctttaacaccccagacaatcgtatttgtcgtcttggcagttgttaaaatatcgcgatcggcgacacttttgccgcaactacttagtggcatcattaacaacactaagagcaacggcaggagcatgcgtttccacaattttgccattcaacttcctcctctttaaacgcgatcgctggcgtagaaatctgcgcataaggatcttgatcatggtggccaaggccatcacttccaaggccgtttacgcgccattttcaccgcccagctcacgcccttagtggttaataattttactgagaaattccttggcccgtggttcttgaggatcatcaaagaattgatcgacattggccgagtcaaccagaatctggccgtcatccataaagacaatccgattaccgacgtgacgagcaaagcccatttcgtgagtgacaaccaccatggtcatgccctgttcggcaattttctgcatcacatccagcacatcgccgatcatttccggatccagtgcactggtcggttcgtcaaacaaaatagctttaggtttcatcgccaaactgcgggcgatagctacccgctgttgctgtccaccagaaagctcacctgggaaactgtcggctttattttcgaggccaaccattttcaacagatcatgcgcttcctgctcaacttcttgattatttcgtttcagaaccaaatctggtcctaaggtcacgttttgcaacacattcttattggcatacaggttaaaatgctggaaaaccatacccacatttttgcgaatgcggttcatatcggttttcttgtcagctaggtcaaaatcattcacgattagttgtccagatgtgatccgctccagcccattgatgcaacgaagtaaggtacttttgccggatccagacggcccaatgatggtgacaacttcaccacgatcaactgtgagattgatattctttaaagcatgaaatttaccaaagtacttattaacgtcatgaaattcgatcattgacatgttcgaggacctccttgggttcactgatgcttatcatggattttacagagaaacttaataatgcgcaaatatttcttattcattatgacaacctttttactttgaagagcttctcatcgcctttatttgggacttctgagcgttctatgaagttttaaaaggtgttgtgatcactggtatctaaaaccgctcaaacgtcagtagctacccttctatgacaaatgaatcagtcctaaaacgttatgattgccttgctaccattcaaagggacagttatcttgattgcctgccgctggttaatcacctaactcacactcaaaaaaatcaggccaacgtcacttttgcgtttctagaaaagtaacgttggcctgactgtagccttatttcaattgatggcacaactatttcataacagtttattcatcgtggcgatgccgtctgctttcgcgagtcggcaagggcctggatgctgcctgcgaggttgacggggctggctcacgggtcattttagcagtttcgcgttggctttcgcgcgttgtgtgtcgtgaatccaaaggctccgcctcatgctgccgatcaccagtagttgccttgtcctgatacgccaactgcacggttaaactgtaaggttgcgcttccttgcgtaagccgcttcgacccagcagcttctgttcaccaccgatcaaaaagacattggcaaccacaagatgatagtcacgctgcgccgcttcgaccggcaacaaaccaacccgatcaacggtggccagtggcttggccattaaggcattcaagccgcccgtgatgacaagcttactgtctaggtgctgtagatcaaagaatggcaacgggaacggtgcgccaatcgccagaaccggttgttgcgtctcctgtgccacacgaccaacggctttgtcatctagtccttgataattcaaactcagcacaccttgtttaacgaggctatcgacaagcgtatccaaattggcttgctgttcctccgtcatggtgacatcggccgtcagcaattgatcttgtgaaaaaacgccttgagccggtgctgcacccaattgtgtgcgcaattcattttcgacagcggtttttttggcagcgttactgccaagccatttttcaaccttgggtgaaatgtcaaacttcgttgtcttatttgtaaaataatataagaagttcaagccaataaaatacaaaaagacaacaaatgcaagcataaacagtgcgccgcgaatgcgaaagtccggatagcgcaggttttgaatcgccacatatagtaaatagaagttggcaatgagtgccacccacgtgaaggctttccccttgggtttgtcggcaacgttaaaatagcccaacacgcggttgataatatcaataacagttaacatgatctcatcctttccgcgagttactgaccgccagagccggttgtgtctgtttcttgaccattttgattattattctgctgactaggtgttgttgagcttgttgaggcagaagcagacgaggttgacgttgtgtctgagctgcttggttcctgagttgaagcagccgaactcacggtgctgttatcatcattttgatcttgattgctggtttcagcctgcgattggctagcctctggttgccgcgacgccgaagcttgactcggtgcaacatgtgacgacgcggactgaccagcacgcgaggcagattctgattttatttttgataccaattcactttgctcagtcgccgattttggttggttcaccggattgatcgtgttcacaatgttatatgcactaatcaaaacaatgagtgacacaatcgcagtcggtggtaataatggcggggtacgataagacatgaagccagctcctttcatccatcgtttaattgtacctcaataactagatgataccatttaagttcttgctaagatgacaagtttgccatttcgaagtctttaaatggtggtcatgtctgccctgataacacgctcccattcaaagatggaagaagccgacaacgtacatctaaacgtcttccacctcaactcattcgggacgcattccgctgacgccctgtcttcaaagcgctgccgcctgcgttcataaaaaaaagcacatacatcaacatgtacatgctcgcctgtcgcttaggcatttttaaggcggtctgcatgttgctggcattccgcacacagcccataaagttcaaaattatgactttgaatttttgcacccggcacttgtttctcgaagtaattgagtggacacattttcaactcgatcactttcccgcaatttgtacaaataaagtggtggtgatgcggatgctggaaatcacactgtaatttcacaacaatctgatcatcttgcatccggctttcaacaatgcccatctcaataaatgatttgacatttcgataaatagtatcgtgagagactcccggaaattgggtacgcatataacgatccagtatcgtcaccgccgtgtagcgatgctgattcctgccgagataatcaaccatcgattcacgctgcttggtcacgcgataaccgtgctgtttcaattcttctaatgcaatcgttgtgttatccatgcgaactcctttagcttgacactttgattaatggcgtgtagactattaaatcgtattgattacgattaatcaatcattagtgtaccacgcaaaacaggaggaagcaatatggcagaaaaaactgactacgcatccgcagcacggcggttgaagagtaaaaacccgaaaacccgttcacgggcaaaacgcatgattaaagccgttaagaaaccagtcaagtaattttatcgcattattcaaacaaaatgtagcaaggcgcgagccacggtaatgatcaccggtgctcgcgccttatttttgttctaaatcaatgcgggcaaggccgcaacttttcaaagccaaggttttcataaattgatccacttgctcgcgcgcctcatcccaactgtcatttttgatcacagtggcaaacggctttagttcgtctggcaaggttaaatcgcgtttatattccggacttttcaaccgcgcagcaaccatggcaggatcatcaccacggctcaacaaccgatcttttaataccgttgggttatcaattgttaaaaataagaccacgacctcctttggcaactcacgcacataggtaatggcaccttttgtgtctagaacaatactaaggaagggatgcttggtccagtttttttcaagcgattcatgggaggaaccgtactcataaccagcataagtgactttttcgataaaatgtttggtcgcaaaactcgccggtgtttcgaaatagtaatcgaccccattcttttcccctgtgcgcgccggacgggtggtgtgcgtcatcacgcggtggatgcgataattatcgcgaagataaccactcaccgtcgttttgccagtccctgttgccccagtgatcacaatcaacttatgcgcagctttcatgatcagcctcctcttaaatgattgcctcgattgtaccaaatcagcgcggattagtcagcttgaaaacaggttgattgattcggtttatcaataacgctgttaccaactaagaatggctaatgctgatcatgataaaaagcaatcacgcccacttgttgactctccacaaacccagcggctttataaaagcttcgcgttttcggatcatcgtccgtcaataaaacccgttgccgcacttcagggaaccgcgccagcaaagcttctattaattgtttgccgatacctcgacgctgatattctggcaaaaccaacagatcctgaataaaaagaatggtttcgccgtcaccgactgctcggattaagccaactaactgtttgccctcatacgcacctaacaccatcaatgaataggtcagtgcccgttcaagtcgcgcaggatcgcgagtatacatgctccaaccgacacttttataaagtgccaaaacctcgggcatagttggtttttgatcagtaattgtcaccatggcgtgtgtcccccctttataaaagaatgctttgcttagagtagaaaaaaagatcgatcatgcttgatcgacctttcaaatactattgcaggatgtgaacgatatttttacagacgacgaccgaagcttggtgcgaagtatgccatgctctgaatcgtaacgttttgaccaggagctggtgcgtgaagatattggccaccgccaatgtaaataccaacgtggtaagcactaccaacgccgccccagaagaccaggtcaccggcctttaagtcagaaacggaaacgtatgagccaagcgtactttgagcttgcgaagtccgtggcaagctgatcccagcttctttagctgcatagtagatcaaacctgagcagtcaaagcctgatggtgaagtgccaccataaacgtacggaacaccgatatacttagcggcgttgctagcgatactgccaccggaaactgaaactgagctattgtttgaagcaggtgcctgtgaagcgctggcgcttgaagaagcactggtggtgctggtattggtgctggtgttaacactacttgaagctgcactgcttgaggcggtgctggttgaagaagcagatggtgttgcggcaacagcagcggttgctgcggcagctttagcagcatcttcgctggcggccaactgagccaacttatctttgttagcttcaagtgtttgttgtaaatcggatgcagatttttcagcatcactctttaagctttcgattttagccttgtcgctttccaactggctctttgtcgcaacaagtgtttcttgcttggcttcttgttcagtttgcagggtcttaactttggcctgtgaatccttaaccgcctgcaatgcttctgcactggcttggctaagtttgttgaccgtcagtgaacgaccaacaagatctgtaaggctgtttgaattcaaaacaaagtcaaaatagatattgcctgtaactgaattaccaacctgcttttgcaatgaaatcaattgttccttcagattgtctttacgcttgccgacttcgacttgcgccttaacaatttgttggttgtaagaggcaattttagcctgactagcactaattttttcttcagcattcttaatgtctaatgctttgttagaaacatcattgctcaacttcgcggttttttcatttgccgtttggatttgcttgagcaaggcatcattcttggcagtcaaactagacttatcgtcatcagctttaactgttgtggcagccacccctgaaaccccaaccccagccaatgttgcaactgtgataaagcctgtaactaattgctttaatttcatctttatcgtcactcctgctttcgttttgttcacaactgctacattaacactggactgttacagtctcgttacagcatgtttactatcagaatactttcttcaacatattgtcatggtcaaatataaggaagttcataagaactttttatttcggttattttcaagaagaaaaggagagtcgaaggtaccaaaaaaaggcctgtgataaacgtttgttttatcacaggcctaaatcaccagtcgtcatttttattaactgttattgtttaatagtcaattggctataccaatcatgcgactgggaagtcaacactttttcggacagtttgctaagcgactttttgtgaagcttggtcatacaaggaaagccatgctactggtgcaagatagtctaagcgtgcttgtacccttacgcggttgtaaaaggtctcgatgtaagcgaagacttgcgctctcagatcattgatatctttaaattgtatctgataaatgagctctttcttcatgatggcaaagaagctttcgctccaagcgttatcacccggttttcccaatgctgagaagctacgttgccaatgatattggttgaccaactttgtcactgctttggccgtgtattggctaccacggtcactatgaaaaatacacgtttctggcaaagcccacctttggtgggcttgtttaagtgtcgctaagactaaatccgtgtccatatgattggatatttgatgagctaacactaggttgctgttcaaatcccttatttggcaaatgtaagcttttccttctgatgttgtcgtctgtgtaatgtcacttgataaggcttcaaacggcttaaaagattggtgtttcactagattgggataatcaccttgacgagcaaggcggctatcggtcaaactcttcggatgacgacaacgtagcgttgaatacagaccgccatcagccatcagacgggcaactcggtgataggaagctttattaccatttttacgcaataaaccgcagatgcgtttgggcccgtaagtgccctgtccttgatcaaaaaagtgtttgattcgttgacgatattgcctttctttggcgtttcgctttggcaaagctctccgccaagcataataaccactcgttgatacgtctaacaaacgcgcccaccttaccacagaaacagaggtttccctcaacataaaagcatacttatcgctgggggttacttctggagactggcaaagtaggcagcggctttttttaacatatcacgctccaatgctaattcggcattttcacgttttaaggcacggttctcagcttctaaagaagcaagcggcgtttgctttccatcttcggtatatagcttccgccaacgatacagggcactttcaggaacaccaagttcggaggcaatgattttaactggtttggaagagttaaaactccctagattgcaataataaagttaccacctagaaagaggcttgctcactgcttgaactggggtttgccaacggagacattttctaggtttgttattgataagcgctgtggcttgttgaatatcggtctctgaaacctgatcaaactgtgttcccttcgggaaatagtagcgaagttctcgattgaaccgttcatttgtgccccgttcattcgggtgataggcgtggcaaaagtaaaccggtatccgatagcgctttgtaagcgcctgatcgcaggaaaactctttaccgtgatcaaccgtcactgatcgaaccggacccggaaagtccaccatcagtcttgcaaatcccttgagaacagcattttgtgataagttttcaagcttagttgtcgccattaaacgtgtcacccgatcgacaatggtcaaaacagcagcctttgacccgcgaccaccgcgaactgtatccatctctaaatgtcctttttcggttcgccgattagctgactcactgcgaatctcaattgaggtgcctactgcttggttatagcgcgaccgaaggtcttgtcttcttttatgacgtttaccgtgatcaaagagttggcttggctgaaaatcgacttgtctttgataaatccagtggtaaatcgtgtgtggcgcacagtgaacggcataaccgaccatttcaggggaccaacctaggtttagcttctcagttaccatccgcttcaacttaggcgttaaaatcgagtgccgaccacaacgatgccgacaagtatcggcatgatcctgagctataatggcgcagtaatcaccttcagggcaacggtgaagctcatgcctaatagaaatacgagagcggcctaaggtcgcggcgatgtattgaatcgtgtggtgttgcatcagttctatctgagatcgttcaattaaggttataatggccatgggacctgtccttctctctagatggtatgttatgcaaacaccattttagcaagaacggacaggtcttttttcacattttctgggtggtaactttaattatgcaatctaggactcaaacgtaccgcatttttcttaaaatcttggtcgtagcgattgcgtgaataggtcattttgaggactcctttcggataaatcaattctcttatgtttctgtccgaaattctagtacagacccacttaaggggttactttgctgccttgatatcaactaaaaagtaccgctttttaccacgccgaacgatgacatattggccatcaaaatgagtgctcggatcaacctcgaaatcgagctcccgctgacgtgtaccgttgatcgtaatcgcaccattttgaatgtcttcgcgggcttgacgacggcttggttcgattttggtagtgtcgactaaccaagtcacaatgttttctgcagtttctggtgcctcaactgttggaaactgcttgaatccctgctggatatcatcagcactcagctcagcgacatcaccggaaaaaagggcagcactgatgttttcggcctgatcaaccgctttttgaccgtggacaaactttgtcaccgcacgcgccaattcacgctgtgcttcacgtttttccggatgtgtcttcgttgcttcaaccaattcggcaatagcatcgcgcgacaagaacgtgaagaacttgaggaacttctcgacatcggcatcatcctgattgaaccagaactgatagaactcgtaaggtgacgtcttctccggatcaagccaaacggcgccgccagcagacttaccgaacttggtaccgtcagccttcaacatcaatggattggttagaccataagcacgggcttctggtccctcgatgcgatgaatcaaatcgatcccagccgtaatattgccccactgatcggccccgccaatttgcaattgaacatcttcgtgtttgaacaagtgcaggaaatcgaccgactgcagaatctgatacgtgaattccgtgtacgagatgccgttttccaaacgactggcgacgacttctttatttagcatactgttaacggaaaaaagcttgccataatcccgcagaaaatcaagcatggataatttcgataaccaatcataattatcgacaatccgaaaatcatcggttccgaataggttctccatttgggcggtcaatttctttttatttgcagcaatcgtgtccatggtttgcaagacccgctcggaattacgcccggatggatcgccaatcgagccagtgcccccaccaatgacaatcacgggacgatggcccagaagttgaaaccgtttgagaatcatgaacggaatcaaatggccaacgtgtagtgaatcgccagtcggatcggtgccacagtatacactgactgctttttcctcagtcagtttccgcagaccatcttcatcggttaattgattcaacgccccacgccactttaattcgtctaaaattttgcctctgtctgtcatgttacttgttcctccctaaacacatttgctggcagaacaaccgctgtataagcgccctagggctattatggccaaaaggcgcttacattcaacttttaagcacgccagttcacgctcttgactaaaatttgtctttgccagaatttaccgccacctgtgagctgagatgaaggatggcaacgtctagatcgttggtcaaggtcattcacaatggcataaaaaaagcccctgatcttcaacgatcagggacgattttcaccgcggtaccacccacattatgctttgcatcactctaatggatatcggcatgacccgttaaccaggctttcattgaggtgtaattcgtgatcaaaggcggaacggtttgcagcaaccaccgtttttctaagacctgcctaggaccactactgcggctcatctggtgactttatggtttagatcttaacacatgtaggcgaacggttctattctttttggacattcttccggagttcaagctaacgacgcagcacttctgaagtgcgtctaacttttcacttttgcgggtcctgtggtgcttcttttggatctcgatcggctggataggctttgacgtcagcgtctagaatatcgtattcatccatgagtctgcgttcgacgcgctctcctagatcataggaatcggctacggtcatattgggattgacacgaataccgatggttagcaagacagcatcgcctgcatatcgtgcttcaatactttgaacgcctttgacacctgggactgcactgatggtttggcggtaggcagcaatttttttggtgtcgaatccatctgttaattcaaaaatggattctcgcagaatagtccaagcggcatataaaatcaaacaaccaacggccacagccgcgccaccatccagccaaagccagccagctttggcacctaagatggcgagtaacgtgccaccgctggtcacagcgtcggcaaagctgtccttggccgccgctcgcaaaacactgctgtccaattgcttcgccctaatatggttaatcagtgaaacggtgcccattgccaatcctgccgctaagctaacataaaccgcaagttctccgggaacctgcagcttaccttgataccaagcttgcagaccgtgatagccgtcaatgacaacatctagaccgacgacgagcatgattaagccagaaaagagtgttgcgatggtttgaaagcgccagtggccaaatcggtgttcactgtcaggccgttgttgggaaatctgcaagccccaaagtaaaatcagcgcagaggccacaccagtcaggttattcaacccatccgcagccaatgcccgagaatgagctaactgcgcgatccacaattctgccacggtcaacccgccatacacaatcagattcagtgcagcagcatgctgggcacttttcagacgggcaaaccggcgttgttcatcttttaaaatatttcgaccagcatccatgcgacatcctcctgactaaattaatttgtttattaaagactattataattcaaataacgcaccggtgactggttataactttacaaaaggatagcgagagcgctttcttacaaaatttttcatgacaataaaaaaagcccagcaatagccgggttttatcaagcattgttcatatcagccgttttcgttttgccgcttcaaagcgcttgtcaatcgttccaatcgagcaatggtgtcatctaaggtcagataataataaaccatattgccttcgcggcgtgagccaaccatgccaatgtctttgagatgcttcagatggtgcgaggtcgctggctgtgacaaaccgatagcatcagccaagtcattgacttttaagcctgtatcattgtctgccgttcccaaaatcataatcaatttttgtcgacttgaattcgataacgcattgagatgtccaatatcttgcttaaactcttttaaagcctcttgttgcgcagagctatatgccgccattatgatggcctccttataaacgcgtttacgattgcggaaacttgcgtctttagaacacggtatgcatcaaatttcactcataacgaatattacctgaaatcgtaacgattgcaaccaatatgcaaaccgttcatactgaatgcatgtcaatcgattatttttggaggtgccaatatgaccacgacgaccacttttcatggtttgggtgcggataacacgcttaccgtttatgcagatggtgctaatgaactattgaatcaaagcatcagtatgatcaatgcttatgcccatttgttatcgctgtatgatgaagcatccctgctgactttgatcaacaagcaggccggcaaagaacctgttcacattccggttcgccctgtgttcaatctgattgctcaagcgatcgcctggagcaaacgcggattaggttacaacgccttaatcggcccgatcgtcaaactttggcgcatcggtttcgatgatgcccatgttccgactgccgaagaagtcactgccgcgcttgctttgactgatctcgatcttgtcgagcttgattcagaaaatcaaactgtttttctgaccaaacccggtatggcccttgatcttggcggtatcgccaaaggtttcattgtcgatcaagtctatgatctttgggacaaaaccggcgttgaaggtgggctgattgacttaggtggtaatcagcggctcgtcggtaatgcggccagcggcgtaccgttatggcagtggccaatcactgacccgcggacaccgggaaaacgcagtatcgctaccttgacaaccacccctaaagccgtcgtgacgactggtatttatgagcggcactcagagatcaacggcaaagaatattaccatttgattgatcccaacacaggctatcccgtcgaatcagacatggccagcattaccgtcgtggctgatagtggcctgatcggtgatgtgttatcctctattgggttctacgctggtattcctgccggttatgacgctgttgaagccgaaggtgaggaagccatcttcgttactaaagatacccgcgtttaccaaacaagcggcctgcgcgaaaccttggccgtcaccatgtaaaccttagccaccgttgtcttcagacataatagtttgggacatcactcataatcatcaaaagggcaaacaaattccactgtaaagcggaagctgtttgccttttcttattgtaatctattggaattttaaggatattagtgccaaggcggagcaatcgtaggccagatggggctcagccgtgcaaacaacacagcgactgggctttgtcgctgatgttgttaggcgacttcgagaccggtttttgggctcgaagcgccgtcacagcgttccagccccgtctggccggagattgcggagtttggcgcggcatgagactctttggcctagaccttacccccccccgattattcagaatctaataaatcacaaacccaatacgacaattatgccccattcttttatgccaaaatgctataacaaatcacagcattcataacaataacataagcgttaaatctgctgccaaatcacaccgcctgccggcaccatcgtgcctactggcaataaagcgcgcatactttttggcactaattcagcatgcggatcctgtaacacttgcggtgatccagttggattggccagaactaccagcgtttgggtatcattttggcggacgaagccaaaactgtcttcaaacgtaaatgggaaaaaagcggcacctgcagccaaggctggctgaccaatgcgggtctgaagcgcgatttgataaatatccaaaacagcctgatcttcatggccccacggataaaaggcgcggttatccgggtctttaccgccagttaacccggcctcatccccgtagtaaaggcacggcaccccaggcagccagtaaaatagcgagacgataaactgcaacttacgccgatcaccatccaacatcgttaaaatccgtggtgtatcatgactgccaatgttgttgaaattgaacgcaaacgcatttgttggataattctccttcaacgtcatcaattgacgcacgaatcctgccgcgtttaattgcccatttgtcaggtcaatcaacatggatcgcagcggataattcatgactgcattcaattcgccgccttcaaaatattgccgccgcttgccataagcctgtttattggaggcatcctcccagacttcgccgatcagcacccgctccggaaattgatcaagcgtgctgcgaatctgccggataaaatcgtccatcaattcatcggcaacatctaagcgccagccatcaacgcctaagtcagtccaataactgatcaccgaaccttttttagccgcaatgaagtcatgaaaatcttgattatccttattgatggctggcagatccttcacgccccaccagctattgtagtcatcaggaaatcgcttgaatgaaaaccacgaggcatatggggaatccaagctattggccgcacccacgtctgaatattcattgacggcattgaagtagcggctatcagcgccgacgtggttaaacacgccatcaagaatgacatgcatccccaactgatgcgctgccgccaaaaactgcttaaagtcatgcagcgaacctaaaacttcatcaattgcgaaataatcgccggtgtcataccgatgattgctccgcgcctgaaaaattggacttaaatataaggcgttgatgccacgggctgccaataatggcagcttttgttgaatgccagtcagattaccgccgtaaaaatcccagcgaatgatctcgccatcgttcccgcgaatatacatgggccgatcagtttttcgcccatacagaaaagagttttccttcggagcattcacgtgaccgtcagcattcccattattgaagcgatctacgaagatgtgataaaaacgggcattttgataccacgccggaacgggatcaaatgcggtcacaacggtcatctgataattaaccacatccacattttccgggtaaagctgacctagcccaccaaaaccaccgccgaccgcaccaaagcgttcgcggccattgtcgctttgcaactcaaaatgataaaaccaaagaccggcattaggaggcgtaaacgtcactgtgtagccgttagggcttttcgtcatcggcaaggactgcgtttgatcgcaatgttcgtctggcataatgacaagtgtggcttgtgtcaccgcaccatcagcctgtgccgtcaatgtgacagccgtgcctttttgcaccgcgccaaaaggtcggcgatcggtaaatgaatcaaattgaaacattgtgttcctccatgtgtcatgtacacgaaacgctctcaaaaccgataaatgaatcttcattaatcacgcaaccgatagctggattgataacaatgagcgccaaggcatgctgatcagatgccattctacatcgagtgtttccgataaatccgagctggcgtcgcggcgattcaggctggtggctgcgcggccaactttctgcatgttatctaaaaaacaatcaccagaagtagcctcggtatggccgctttaagcctcgtgatcatcttctggtgtctttgccaccacatgccaaatctcgcgaccatagcgttgaaccgtaaagtcagccgagaatcggccactttcggcaatatttgccaacgcctttttggcccaaatgcgcggttgttgataaagcttatccagtctttcgttcgcagccagataactttcaaaatcggccaacacgaagtattcatcgttgtaagtcaacaacgaattgaaaatgtcacgaccttctgtttcaatccccgggatctgcccattgaccagcatatccagtgcggcgtgcaagcgtggatcttgatcgtaaaagtcgcgagcatgataatcgccacgctggtaataaccggcaatttcttcctctgtcaacccaaaaatctcaacgttgtcatcacccacggcatccttgatctcgatatttgcgccatcaagcgtcgccaaggtcaaggcaccagcactcatcagcttcatgttactggtgccgctggcttccttaccggctgtggaaatttgttcagaaatatcggccgcaggaataatcttttcagccatggtgacaccataattcggcaagaaaacaacttgcaagtacttgctgacatctggatcaccgttgaccaaatcggcaactgcattcataaccttaatgatttccttggcataaacgtaacttggcgcagctttagcgccaaaaatgtgcaaacgctttggtcgtttttcgccacgtttgatcgccaagtaagcatcaagaatccctaagacatgcaataattgccgtttatacgcgtgcaggcgtttgatctgcacatcaaaaatggcatcaggatcaactttgacatgcacaacctgatcaatatacttcgccaacgctcgtttattttcggccttagcagcattcaggtcgtcgagaaaccgggtatcatcggcgaagtcatgcaactgccgcaatgccaacgggttttttcgccaagttgtcccaatttttttatccaaaaggtgggaaagcggtcgatcgccaatttgaatccaacgccgcggcgtgatgccgtttgtcttgttattgaaccgttctggaaagatttgatacaagtcatgcaggacgtcttttttaagcaactcactatgaattggggccacgccattgatcgcatgggaaccaattgatgcgagataggccatccgcacctgtccgttaccaagcggcgcaatacgatcaatcattgcttgaccaaattgcggcacgaaaaccagccggaagcgacgatcaatttcctgaatgatttgatagattcgcggtaccatgccgctgaacatgtcaattggccaaacttccagcgcctctgacaacaacgtatggttcgtgtagctcatcaccttgagcgtaatgcgccaagcttcgtcccagctaacatgctcatcatccattaacacccgcatcagctccggaattgccattgctggatgggtgtcattgatatgaatggcaacgcgatctgcaaacccggccatgctgttgtgggttcggcgataatggcggacgatgctttgaatcccagcactcgtaaagaagtactcttgccgcaatcgcagctgcttgccggatgcatcggaatcgtctggataaagaatctgtgtaatctgattgatccgttctttttgttccaacgtaaaatcggtaccggcattgatcggtgcttcagcagaccacagacgcaggttattcaccacctgattgtggtaccccaccatggccacatcgtatggtacagccaatacatcgtcagtattgtgatagatcacccgcagattgccgctacgacttgggcgtaactcaacccagccgccgaatttaaccgtgactgcgcgattttctttacgagtctcccatgcaaagccattccgcatccaatcatctggcagctcaacttgatacccgttgacaaaggcctgcttaaacagcccgtactggtagcgaataccattgccgttaccagccatgccgacactagccatggcatccataaacgctgatgccaaccgacctaaaccaccattgcctaaacctggatctgcttcagcatcaaaaattttctgcggtcgcagtcccaactcattcaaccctgcttcaacttcactcagaatgccaagatttagcaaattcgactgcagaagtcggcctggcagaaactcaattgaaaagtagaagacctgtttcgtctcctcctgatcgtaacgtttcttggtttcggcccaaggttggccaatatatgaccgcgttaatagtgccaacgcctgataaagctgttgggtggacaggtcatcgagcggtgctgcatacagcttcaaagcaatatctttgaattctgtaatgaattgttcctttgttaatgacataaacacacctcaccaaattaaatacagcaacttttaaacgcaacgcaccccgggagtgacaccatgtcgtcgtacccacggcgactccaaaacgagccgaaactcattttgataaacaaaacgaggtcggatcgggtcaccttgccagccggtttaacgcatctacgcctcgcctgccttccgactgatcccgacacgacctcgctgttgtcacctcatgctttgcccagaatgcgttgataacctttcaaatactcagctgcggaatggtgccagtcaaagtccttcaccatcgcatgttgttgcaacttagcatagacttttggctgatccgcataaacactcttcgccatgcgcagaatgtttgtgagcacgcctgcgttgtaatcccagaaactaaacccatcaccggcgccagtttcagcgttataggctagaaccgagtcacgcaaaccaccagtttcatgcacaattggcagcgtgccatagcgcatcgccatcatttgtgccaagccgcttggttcaaaggcacttggcatcatgaagtaatcggcgccggcataaatccgctgcgctaagccttcatcaaaatcaatccgcaccgccaattggccagggaaccgatcctgcaatgatgacaaatcttcttccagatcttgatcgccagtaccaagaaccacgacctgtacattattttgaactaagaaattctccaaagcatcaactaagagatcagcccctttttgccgggtcaagcgactgaccatcgcaaacagcggatcagtcctctttggtaaatgcatctcgtcttgcaaagcctttttatctttggccttgccagccaaattcttggcgtcgtacttataagccagactctgatcagtggctggattatagacttcagaatcaaccccattcagaatcccgaccagtttaccactttgttttcgtaacgtgccatccaaatgctcgccaaaggctggtgtttgaatttctttggcgtaactcggactaaccgtcgacacaagatcggcgtaattaatcccgcccttgagccaattgattgacccgtcttgaccaaagccatcgtcgttgaaaccttcacggccaataccaaaaacggtcgctaacgttgacggcgggaaccagccttggaattgcagattgtgaatcgtcagttgtgtcttaatctgttgatacggcttgatccaaccatacttttcttttaatagcaccggaatgaaagctgtgtgccaatcgttggcatgaatgacatctggaatccattcaatcacctgaagcatttcaatcacggccatttggaaataaccaaaccggccgccgtcatcccagtaaccgtacaagccatcccgatcaaaatactgccgattatcaatgagatagtacgtgacatccccgagtttaattgttttaaggccaacgtaaactggacggccatccatctccaaggtgaaatgggtcaaatccttcactttaggcagatacttcgccgggaacttcttttcataaaatggaatggcaacccgaatgtccacaccttgcttcttaattgctttaggcaaggcataggttacatcccctaaaccgcctgttttataaaacggcgcactttccgcagctgtaaagagtactttaagcacgggccgtcaccccctggccatctggctgaaagactttctgattcttcgaaaagaccaatggctcctcaggggtcccttccaacgcaaggtttggcccaatgaccacacctttgtctaggatcgcatacttcacactggagcctgtgccaatcttactgccttgcatcacaatactgtgatcaaccactgcatcacgatgaatatgcacatttctgaagagaatcgaattatcgaccgtaccttcaatgaagtcaccagtacctaacaagctgttggtcaccttggattcggttgaatagaaggtcggaatttcattcttattcttcgtttcaatcgaattagcactataaagcaacgcttgatagttttggtcttccaacatgctcatgttcgcgtcaaaataccgctgagtcgtattcaactttgccagaaaaccagtatattcaaacgcgttagcattattttccagtacggcttcacgtagaatttgcggcaaccgtttgaatgttggcgcttcggaggcatccgtcagaagatcaatcaagtcaatcgtcccgatcagataaatatccatgaacgccgggatcttaccttccttgagatgcccacgattttccgatgctgggacaactgagctagccgtgccaagctccgtcatatccaacgttaagtcttccggcttcatcgcttcttccggcagattcttgtaaaccgccgtcaccggactctcgccagcttggtgataggcaacgatggcatcgacatcaacattggccacaatttgcgtacccatgataatcgtgtactgcgcgctgcttttgcgcagaaattggagatagtcgtcaaaataccgcgcgcgtaattttggatcttcatagtcgcggccagccatatacggatacgtgaaaataccaccagtaatctgatccacgttccaagtcgacccgctacgaatgtggtccgtgaaactacgaccggactttggcaggaaaatcgccacgctgcgcacattggcatgatccaatgatgacagtggaaaatcgatgagacggtagcggccagcaaacggcaaggtaccgatcgggcgggctgctgtcagcggctgaatttggtcgtctggttcattcagatcaataattgctgctaaatcgccttttctcattctttttcagtccttcctaaaacttccccataaccaacaacgctaatttcattcggtttgccgacaactttaccattgtccccaataatcgcattttcaccgacaatggcatgatcgacagtcacgttcttaccaataacggcgtttggcatgatcatgctgtccttgatcacggagccttcaccgattttgacgttttgactcaaaatactgtgctgaattgaacctgcgacatagcagccgtcaacaatcatggagccagcaactttggcggtcttggtcaggaacattggcggcagcgcctcgttttgactgaagatccgccagttgcgattgccaatgttcaatggattgttaggattcaagaattccatgttagcttcccacagactctgaatcgtcccgacatccttccagtaaccgcggaaggcataagcatagctggcttcattatgcgtcacgtaagctggaatcacgtcatggccaaagtcttccatggcaccatctgttgcataactttcggtcaaatattgtttcaacgttggccagttgaaaatgtaaatccccatcgaggctaagttactctttggcttggctggtttctcttcaaattcaataatccggtccgtgtcatcggtgttcatgatgccgaagcgtttggcttcttctttttcaaccggcatgacagcaacagtcaatgaagccttcttggccttgtgataatccagcatcgcttgataatccattttataaatatgatcccctgaaaggattaacaaatattgcggattgtacgagtcaatataagcgatattttgataaatcgcatgcgccgtgccttcaaagaacttttcgccttcacttgaagcgtaaggctgcaggatggtcacaccggcaccgcgttcattaagcccccagctggcaccattttgaatatggcgattcagctcaagcggttgatactgggtaatgacccccgcggtgttgacccctgaattagctaaattactcagagtaaaatcaataatccgatatctacctccgaatggcaccgaaggcttagccgtcgttttggtcagtttccctaaacgggttccctgccctccggctaaaatcattcccaacatttcagtactcatgattgcggcgcattgtgcgccttcccccctaacttcttcgattgctgatggttaactttgctaatgtcacgtggttgcgaccgcgctggcgatgtgccccagtcgtcttgatgactaatcggttgccgttgatgaccggcgagtgacaacggtgtttcgtgtttcggtaatgccttggttggctgcttgcctttaagtgccaacggttttttcggcaacggcttcagctgttttggtttaatcaacaaagcgcccattgctggtaaaatgacgtcaagccatgcaggaacgtcatggttttcgccaatctcagcagtcaaggtctgctgccacttggtccatgtaccgccaaaagccgcatcctcagtatttaaaataatctcgtacgttcccggactaggaactggcacgcggaaatgatctttttgaactggcaccagattcatggccactaccgtaaagtcatctttttgtttgccataacggatgtaactcagcacatccggctcatcggcaatcgtgattttgatgccgtcgggttcatgatcttgttgccacaaacttggccgagctttataaagatgattcagtgtgatggtgaaatgctgcatcttcttattcattgggtctttaagatcggtccactccagctcgctccagtcgcgccattcaagaaactgcccccactcgctgcccatgaataatagctgtttaccagggaatgttgcctgccacacatacatcgtccgaagattagcaaactggttataccgatctcccggcattttgtgcatcaggctctttttgccatggacaacttcatcgtgtgaaaacggtaagacgaattgctcgttatacatatacatgaatgaaaacgtcaataaattcatatcactgtggcgataaaccggatcctgctcgaagaacttcagcgtgtcattcatccagcccatgttccacttgtagttaaaccctaagccgccagtatcaatcggtgctgaaacttgcggataggcggagctttcttcagccatcatgagcacatctggatgtttggcaaaaatctttgtattcagttgcttgataaaggcaatgccttcaaggttgtcacgcccaccatccttgttgcgatcgttttccttgccagcgtcataatccatgtacaacatgttcgagacagcatcgacccgcaggccatcaaggtggcagtgatccaaccaatacatcgcactggaaattaagaaactctgcacttgtgccttgccaagatcgaagttccaagtcccccagcggacattttctgcgcggtgcggatcggtgtattcgaaggttggcgtgccatcaaattgggccaacatatcggtgtttttgatgaaatgccccggtacccagtccatgatgacgcctaatcctgctgtgtgagccgcatcgaccaaccgcaagaagtcttgcggatcgccgaaccggctcgtcggcgcgaagtaacccattaactgatagccccatgaagcgtcaagcggatgctccatcaacggtaaaaactcaatgtgggtgtagcccaactcctgcacataagggatcagcttgtcgatggcgtcttgatacgtcatataaccaccatctggaccggcattggtgtcgcgaatgaaggagcctaaatggacttcgtaaatgttaagcggttcatcataaggacgccattttgcccgcttggctagccaatcttcatcatgccaagtaatgcgcggcacatcgaccaacttagccgcactgcctggcttgcgttcaaacccaaacccgtatggatcaatcttttcatgggctatcccatcaggaccgataatccgatacttgtataactgattcttttcggcggcaagctcaccgtaccaacaaccggtggtgccttgcagtttcaacggactgccttgccagtcgttgaagtcgccttcgacgttgacttgttgggcatgcggtgcccaaacgaggaaggaccacttgcctggttcgatttcatgggcgccaaaccgattgtaactttgaaaatcttgcccggagttgaagaggtataaccaatcttttaatccctgaatcatgatcactcccccaatcaaacgataccgtcgtacatgtgaaggcttctcattcactgtacggccggacttttacctaccaattccagtgtaacagtaagactatcaaaaggctcaagaaacgctcaccaaaaaccttcacgcacgccaacataaatttttgataaagcatttactcccagtcctcgtctcaattgtaaccgcttactgttaatattaacagcgattacaatcttttctgttgagttctttgtgagaatactctaacatgataggtatattatttaatgaaaccgcaatgttcacgcaacgttactctgaaatcaacctcagccggctgttttcagtcagacgcacacaaatactggaggtactgccatgagtgtcaatattgattggaacaatctaggcttcgattatatgcaactgccataccgttatgttgcccactggaaagacggggcatgggatgaaggtaagctgtccaccgatcccaacctgacgatgaatgaaggctccccgattttgcattatggtcaaggcgcttttgaaggtatgaaggcttaccggaccaaatcaggaaaaatccaacttttccggcctgaccaaaatgcccatcgactgcacaattctgctgacaaactactgatgccgccatttcctgaagatcgctttattgatgcggtcaagcaagtggttgccgctaaccatgaatacgtaccgccatatggcaccggtgctaccttatacttacgcccgattttgattggtgtcggtcccaatatcggggttgctccggctaaggaatacattttcgatgtcttcgccatgccagtcggcccctacttcaaaggcggcatggtgccaaccaagttcatcgttgccgatcaattcgaccgagcggcgcattacggcactggccaatcgaaagtcggagggaactacgccgcatccttgcaagccggcaaattcgcccacgagcacggttatggcgatgcaatctatctggacccaattgaacataaatatattgaagaagttgggtcagctaacttcttcggcattagcaaagatggtaaaactttgaaaacaccgaagtcaccatccatcctgccaagtatcaccaagtattcgattttggcactggcgcatgatcggtttggcatgaccactgaagaaactaagattgcgattaccgatttggaccaatttggtgaagccggggcctgtggcactgcggcggtcatcaccccgattgccagcatcacctacgaagaccacgaacatgtcttttattcggaaaccaaagtcggtccatatacacagaaactgtatgatgaactgacgggtatccagtttggcgatgtaccggcacctgaaggctgggtcgttgacgtcccgtttaattaatttaaaaatcatttatcactcggaaactgtgagttcttgcacgcgctataacgcatctgcaatcgcgtacgcccgctcacgcttccacaaaaaagcagctgcccgttttaccggcggctgcttttttgtgaggaaagtcattttgcctaattcaacaatataacagtcaatcaattcaaaacttactaagcaactttacgaaaaagcctagaacctgacaacctgaaattgaaagccaaaaaacaatggtgatcactcattgcctaattcaacaatataacagtcaatcaattcaaaacttactaagcaactttacgaaaaagcctagaacctgacaacctgaaattgaaagccaaaaaacaatggtgatcactcaacggccttaacgtgcaaaggcaatcaagcgccagtaattacctacgcaagtttgtaaggtaatgcgctgaccgccgccagtacccgtgattgcgttccataaatcttgtccactggcagtgacggcatttggattcactgtcgccaattgataaacatggtacgtgcgcgggttaccagcagcgtcggtcactgtgatcggcgaaccaatgccaagtgatagcatcgcggcaaaagaaccaggattgtggccaataaaatgcgtgttttgaccactattgttactataatttgcttgaccgccccacgttgcagctccagtgcccggtgctgcagtcatactttcatttccaatgatataaggcactgtcacacctgcaaacattaggacgcggctcgcataagcaggtgcttgctgtgcttgcggttgtgctggttgttgagcagcagtcgcggtttgagctgcagacggtgctgcctatacagtcacttcggcagtagaagtcgaagcccctgtatttgaatcagatgaatcagaagtagcaacagcttgttgactagccggtgcgcttgaagcaacggatgtacttgccgccgtctgtgatgatgatgcagcagacgttggtttagtcactgaaacagtgcgaacgctccattgcggatgtgctgcagcctgtgatgcaggtgtcttggcagcagtggcatcgagcaaatcgttagaactacttacagtattaactttctccctcgtgcttgtgcgcgatccggccaagtcttgacgctgaatggtggtgcctgctgcagtggtgataagcagcccactgacgacaagagcgaaagtgatgagacttctgcgtaacatatagactcccgcagtccatatcggcaaaatgacttaccacatattcttttcgagatggccatctcatgcttttcattatggcgcattagttttgtaggtaaacatatatgcttaccgattgtaagtgtttaacgttatttttaagctaaataatccttatttcatgcatttatcagtgtttaacgccatatttgctaaacattcttttcaaaagttggttaaaaccattagcattcaaaccgacttttgagatttaaccgtctgatttctaaccaagcgactcacgcttatcaaaaaaaactgcgacaaagtccgaattttttcgggaacgctgtcgcagtttaataccatgatgaagcttaaatactgccgccatgaacctcagttgctgccatggtcaagatgaaagcattgggatcaattgcgtggactaagtcaatcagatggcggaagttggcttgttcaaccacgaccatcaacatctccttagactcatccgagaaaccgccaacgacgcgctgcaccgttaagccgtgcggcgtttcgtcgcggacttgctgtttaatcgtcgccaattgcggactcatgatgtaaactgcctttttccggtcaaaaccggtttcgacataattcatgaccagtccggtaatcgccaaagcgaacacggccaagatgaaggcctcgacgccggatacggggatgttaaaaagtgacacgatcacatcagtggctagtagcatgactgatggtttcaagccaaagtattttttgaaaataagcggcggaaccgtggtcccaccgcttgaggcatccatttggtacaggaacccaacaccaaaggcaaacacaacactgccgacgatgatcgccagcaaccgatctgtgaccaggttgatttctggcgtcaaccatagcagcaatggcaacatgaagctgccgaataaaatgcgttttaaggtgctgcgatccaagaagaaccaagctaaaagcagcatgagcaagttgacgcccattgtggtgatgccgacttgaatgccggcaacttcttgaaccaaaatggcaattccggttgcgccgccagctgcgacagcgtgaggtgcgtagaacatgttaatactgatcgcgatcagctccagcgctgccacgatccaaaaccatttgaatatcggatgacgcatcgttttctgcatcaagccaccctttctgttaatcatgtttaaaccgactcttatcgtagtaataactatactggaaaagtggtggtgtgacaaacaggcgttatttggcatgtggtttggtttttttatgttctatttctgttagaaaatttccgaaagtccgggctggctacgcggcgattcggggtggcgaccgcgaagctagcgcactgggcacgacttcaagcccgcaaagcccccacggtcttgaagctcggccttggtctaggcggagaaaaccattccaccaagaccaatttcagtgctgagcccatcgccgctccgccagccctcatcattttattctagaattcgagagaagttgacgctcacactgttaatgaaatgatgcgaaataacacctgcttaaaacagccaacccaagatataaccgtcattttaaaaattaagaaccacacctagacagtacccacgctttctagtcctcttcccgcaattcacccaagcgccgcttcaatacctcaacctcatcttgtagctcggtgccaatgtcagtttctgctaccgttcggcgccgggcttcggtttcgacgacgcggcgggttgaaatgatatcagtaaggttggcgatagcatcggcttttgtggtgaatggttggtgtgttactatctgcatgccataggaattatccaaaagcgtgtaaccgccgattccggtggttttttgatacggtttagaaaagccgccgtcgatgacgatcattttgttgttcgccataatggggtcggtgccctttttgactggcgtatggccattaatgacatggccgacttcaggatcgaggacaaattccgccaagatctttttgataaattccgggtccttacgcaggtgataatacggattacggccttcgacatgggctttcggatcgctaatgaaatagcgttcaaaggtcgtcatgtcgtgcttgccaaaaagcggtgaatttggaccggtccagagataccacatcagatcagttgctaagtccgcattctccgttggttgactgtatgccaaccgaagatttgcttccagcatgtcaaatagttgacggccagtataagtcgtccctttaatggtcaagccaataaaatggccgtcctcgtccaccggcacacacccgtgcagcaacaaattccggttgtaccgcaaatacatactgccgtgatcaagtagaaaatccatgtggcgatgcaacttttcggagtgcgtaaaggactcaaccagcgagtcaatgacctcttgctcctctggcaacaactcgtaaggatcagccggatcaaccgtcgcaaaacaaccgttttcaatcgtataagtatcaccattcaacttgatggttgagaaatcaggcgccagtttctccagcactagccgatgattcatgtcaaattcaggccgacgtttaatcactggtccttccaacttaaattgaatcatcgcaatcgcctgatgaatctgggtaatttgaagtcgctccgcctcagtaattggtcgatctgatcgctccatttttggtgaaaaggcgggattatcttgatagtattgttccgctaatcgggccaaatgccgcaaattaatcccataaacatcttcgagaatacttaaattgttataccgcgcggaaatccgcaccaaattggcaatgcacaaagccgagcccgcggcgccgccgatccaaataatatcatggttgccccattgaatatccactgaatgacgccgatcacgtctaatcaagctttcaaccacctgatccggcgccggtcctcgatcatagatatcgcctacaacgtgaaagtgatctaccgttaaacgttgaatcgtttgacatgttgccgcaatccactgattggcctgttgaagaacgattaaattacgaataatttgccaataataagccagcttgtcggacgtatcggcatcattgtacagcaactcttcggtgataaagacaaactccggtgccatcgccttgcgaactttcgaacgcgtgtatttggtcgcggtgaacgccagcaagcgaatcaaccggcgaaacgtcgtcaaataccactgttgcaagtcatcctccgccatctcccgatgaatcgccgccattcgctcagacggatagtacaccaaaaaagcgaagcgctgcagggtcgcctccgtcatttcatcgcgaaaacaggaacgaattttgcttttcacattcccgctgccgttccgcaaaacatgctgaaaagcgttatactccccgtggatatcgctcataaacgcttccgtcggcttaggcaaattcaaaatggcttccagattaatgatttcagtcgcaatcgctggcaccgtttgatacttcgccgtcagttcactgtacaagtccatgaaacagcttcctttcacatataccaattttggttcatggcaatatcatagcataatcctctagattgtatacggtttcagctaatttcaccatttccgcttgaaaaataacctctgattcagctctgtcgtcactatcatgtcctaacattcatacaaaaaagcccaaatgatccctcgctaatagtcaatgatgaatgtccaacagtaaacagcgaccagttctcggttcaccgtcatcttgcgattgtcaattgctcatcaaaaccaactcggtaacaccccaagcatacgcaccaaggtttcctcacccatgacgctggagccaccatacgctaatgaccaatcgcatcaaaaagcacaaaaaaaaccgtctaaccatagacggctttcattgaaacaactagcaaaactaacttaactgtgcgcgtttttaaacacttgaggtgctgagcaacgccgcccacaacttctggcgccgaacttcgcgtggtaaaaatacccgcaccgagtcctgattaaacccaaataacagacgacgatcgtccacaatgatcggccggcgcaaaatcgctggatgctccgacaaaagggcgaccgcttccttcaacgacaacgcatcaaagtcaatatcaagggcctgaaacgcctttgaacgacgggaaactaaactatcaatgccatcttccgaacgagcgagcaattccaaaatctgcggcttgctaataccttgctttgaaagcgaaatctcttgaaacggtaatccattcgcttcaagccaagctctagcttcacgactcgattttgacgagcccgatgtatacaacttgatcatccaatcacctctcaacgaaacaacaattatttattattgtttctttgccaataccacccacacattagatgccaatcacattcacaagtcaaaaagatttactcacgacacgtttttattctctttataataacttaccatagtcagatgattttcacaataatggtactcataatttcgttcatagccatcagtgacagctaatcattgaaaaaccatctaaatcttctttcaaaatgagaagtccctcctgaataaaagtagtaaagcccataaataacaattgcacgaacataaaaatcgtcataatttcttgtgaattactagtacaatccttgatacattatctttgcatcagcggttagtacacaacaaacttagcacaagcttatatcgctttcaataacattttttcaaaaatttaatttcaaatactaacaattaaataaaatcgatgacaggaaaacagcaaattccttagaggctcatggcatttcgaattgattcaaaatcatcgacttccaaaattcacaagaaaagctgtgcacaatttattttaaattttattatacgacttattgtagatcaaaaaaaaccgccaagtgcatgtgcacttgacggcagacgcgaacattacttcgcaccatcggctactttctttgatttaccagctgtcggttgcttctcgctaatcacaattgcatcaccaaccagatcagcttgcaacttcttagcctttaaatgatccaaatagaagtcagtcaccttatcacgaatgttgcgttcgatcacacgccgtaatggccgtgcgcccattgcttcatcataaccttgttcaatcaaccaatctttagctgctgcggtgacagttaacgtaatccccttcttggtcaaggtggtgttaacgtcatcaagcatcaagtcaacaatcttacctaaatctttcttggtcagatgactaaactcaacgatcccgttaaaccggttcaggaattcaggacggaagtaaggtgccaaccgcttcatcagatcttcgtcttgctccttcttgccagtcagcgtctcgttgccaaagccagcattggaagtcgcgatgatcactgtgttcttaaagtcaaccacgttaccttgaccatccgtcaaccgaccatcgtccagcacttgaagtaacagtgtcaaaacttgcggatcagccttttcgatttcatcaagtaaaacaatcgaatacggattgcgacgtacttgttcggtcaaggtgttgttgttgtcgttatagccaacatacccagcactggtaccgatcaacttggacactgccgtacgatcactgtattcagacatatccaagcgaatgatcgcatccttgctgccaaaaagatctaacgccaattgtttagccaattcagtcttgccgacaccggtaggcccgacaaagaggaaactgccaattggccgattgccttcatcaaagccggctcgattgcggcgaatggcgcgagcgaccatctcaacggcttcgtcctgaccaatgaccttgcccttaagacgcttaccaatacccttcagacgttcaatatcggaaacgccaagtttggaaactggcacaccagtcaagcgttcaaccgcagccgctacatcattaggcgttgcaacgacaggcttctcgtctttcgtaccatcaagctgatattgcttgtcggcaatcgtcttcttaaggttagcggctttttcgaagtcctccgccttggctgcagcatccttttgagcgttcagatccttaatctgtttctcgagttcaaccttatcaacaatcggatgcttgcttgccaaatgcgccgccgtcatgtcaatcaaatcaatggctttatccggcaataaccgctgtggtatatattggatactgtaatcaaccgcagccttcaaaacattttctggcaattgaacgtgatgatgctgttcataaagcttcttgatgccttccaaaatcttaacggtatcagccgcggtcggttcattaatggtgacatcgttgaaccgccgtgccaacgcgctgtccttcatgatcgtgttgcgatactcatcttgcgtcgttgcgccaatcacggtaatctcaccgcgagatagcgccggcttgatgatatcggccaaccctttgccgccagactcttcgccgccagtcgcaccggcaccaagaatttgatggatttcatcaaagaacagaatcacgttgcctgccgctttggcttctttgatcagattctgaatcttctcttcaaaactgccacgatactgcgtgccagcttcaaggttcgacaaatcaattgaccaaatctgcttgtccttgatcgactcgggcacattgcctttgacaatcgcctgcgccaaaccttcaacaaccgccgtcttgccgacaccggcatccccgaccaaaatcgggttattcttcgtccgacgactcaaaatttctgctgtttcttgaatttcatgctcacgaccgatcacaggatcaagcaaaccgtctttagcttcctgcgttaaattacgcccaagcttttcaagaatgccaccttttttaaccgcttgttcaccagtcgtttcaactggaatttcgtcaccttgcttcggcaactgcccagttgcccgatactgtgcgaattcatctggcgtcatttggtgaccatttaccacataacgggcagattcacctttgcccataccttgtaacatttgattaaaaacatcatccatatcatgattgaaaaacggatcgttaaagtttgccataacttcattcctccttgttgggaaaggtgcttggaaaaggcgtgatacggaggcgtgctatgcagctttacaaaacgcgctcgcgggtcgcagcaacctccgtgtaaggaccctgaacctaactgaccaaaacccagtcagttaggttcaaggccgcttacactccggttgctaaacgctcccgctcgcgctctgctccatagcacgtttgccgttgcgccttttccttgtttacataaagtagtatagcacggttttagcactagcgcaacgagagtgctaaaatttttcaaaactattttcagtgcaaacagcaaggctgtctaatagcgtgacaaaagccgcttttcaactttatgctcattaaaacgcaccaacggatccccgttaacaagtgctcgggcattctcttcaaaaatgtgtaccttcttctcaccacgcttgcgagttaaccgcttgaaggcatcactcatttcgtagctccggcctggcaaatgatgggcgtcggacgcaaaaacatgtgccaaccctgcatcaatgatgtcttcagaaaattgctgcacctttttgccaaacgtgccaacataactgctggccgttacttgggcaaacgcaccgcgttcaatcatctggtaaagcaaccccggatgcttcatcaaacgagtattgcgctcaggatggacaatcacaggaatcatcccacgctgcatcacttcaaacaacatgttctgggtatacagcggcacatcatcagacggaaattcgatcaacacataatgacccgacgcgtcgcaagtcaaaatatccccatgatcaatcgcgtccaacaactggccattaatccgaacctcttggcatggataaatcgtcaatggaatgttgttgcgatccaactctccttgaaactcgtctgtcatacgaatcacatccgcagcgtgattcgtataccgtccattcatgtggtgcggcgtcatcaacgcatgcgtgatcccgtccgcaaccgccgcttgtgctaaatctaatgaagtcatcaagtctttcgacccatcgtcaatgcccggtagcatatgacagtgtacatcaatcatctttcggttccccttccaatatgtactagtatctaatgaagcgctgacaaggtcaaatcgttttttgtaacagtttgttaacgatttgcaataaagccccatcagccgcgcgagattcccaactttgcggtataatattggaatattcggacactatggaggaaatgaggtttagaaatgaaaaagatcctagtacgcgttttactcgtgctactcgttgccgctcttgggtttggcggtttcgtgtattacatggtacataattccacgtcccagatttattcttataataagaagacgaataaatcgtcagacgataagactgctagcaaaaagtccgttgcttacttgttactcggtacagatactggagaactcggaagatcatataagggccgtacagatactatgattgttgttgtagtcaatcctaaatcaaaaacaacgacgatggtctccgtacctcgtgacactaaagtcaattttgacgatgtcacgattaaaattaacgcagcctactcttatggctcttccgatacagccatggcagccgttgagaagctcctaaacatcaaactagatggttatctgctcgtaaacatgaaaggccttgaacagcttgttgatgccgttggcggcgttacggtaacatctcctctcagcttcaactacgaaggcaagtcatttgttaagggtcaatcgtatgatctctcgggaagcgatgcgttgaagttctctcggatgcgctacgatgatccgcaaggtgactatggtcgtcagatgcgtcaacagcaaatccttaccgccgttattggcaaacttaaatcgaacccaacaaccgttctaagtcaaaagtttttagacgcagttggtaagaatgttcgaactgatgtgtctctgggatcagttaagaacctagcaactgaataccgcgatgctggtaacacgattaagagtgatcagttgcacgggacaggtcagaatattgatggtcaggattatgaagtcatgtctgattctgaaatagcacgcgtgcacaatctactgcagaatgcaattgatgcaaaataataaagaaaaagagctgtacaccgatgttgagagatcaacacggatgtaaagctcttttattttgggtctaccctttctggtgttgaggaataatcaacactgaacgtgtaggccctttttggataacgcaaaaagacacctactcagtgtccatgctatgcttgttagcgtcgaaaccaaaagcaagcgaggttatgagtaaatgtcccaatacgatcctacactgtccgtccttggaataccagaccataatatcaaagttgcctttgttcgtcatgaatatcgcggcaacggggtacgtcgccgccagtatcatgtgattgatgccgagctgacttaccggttaacccggtgcccactgtgcggctttgaggccttgcaccctaacgggttttacacggcccacgtgcgcgtcctcaacggggttgaaatgccgacagtcattgacttgcacaagcaacgatggcgctgtcataactgttaccacacagtcagtgccaagacgccactcgtgcaacccaaccacacgatcgccgctcacatgacagagcgaatcatgaagttagcgcatgaacggttgccagtcaaaaccatcgcccgtattatcggaatctcagcctcctcggttcaacggatcattgaccaaaatctcaaactccgaccggctcgccggctacccacgcaactctgctttgatgagttccgttccactcatggcatgatgtcgtttatctgtcttgatgccgattcacatcatctgattgccttgcttggtgatcgatgcaaccgcacgattaaaaacttcttcatcgctcattattcactcgctgaacgcactcgggtccagacggtcaccatggacatgaatgcagcttatcagacgattattcatgaggttttccccaaggcccaagtcgtcattgatcggttccatatcattcaacttgcggctcgtgcccttgatcaggtacgcgtccaagcgctcaaacagcttgatgacaaacacagccgtccttataagatcatgaagacaaactggcggctttttcatcaaaccgcgcctgacgctaaacacaaacagttcctgtttggtttgaatgaatacgtcacgcaacaggaggccatcgatatcgcacttgatactgagcccaagctcaagcaaacctacgagacctacttagcgcttcatgatgctttgatggtgaagaaacatcccgcggaactggcaaacctgttagctacttagtggctggtgaattaggcaacattccggctacctgaaacgtgaatttgatagtgaattaagatggattcctgcttatattttacaaaaatcaaaattggtccattaaaaagccttagtagcatctttagattggctagattgatcgcaatatcaatcgtcactgcgatgctggctaccgttttagtccgcaccaatgaaaggcccaaagggcctttcatgaaggcaaaaccgcgttcaattttcccgcgccgcttctctgcgtcacgatcaacttgccgctgcttagcatccatctttttaggcttacgtcctaaacgtggtcccgacaacctaatgcctagtcgttgacagagctgacgattctcgcgagtacgataaagtgtgtcagctaagatttcatcgggataataaccatgcacgtcgaaataatgatcgatggttgttgctaaatcttggctttcattgaacgccttaaaatcaaatcgttcgatatcgatcatgccatcggcaattgaagcatcaatcttgggaccaaattcggttcgttgtttggctttaccacggttaatcgggcgaatccacggttgtgccaagctaacaatccgtcctgggacccgatgggtccgattttcatacatgaacatttgctggtcaaaaagttcacgaatcacagccaatcgtttggtttgcctttcgttaagagaggcaccgtgggccaacagcacatcgatataacgtagatcacgtcggacatactggagctgtactttgatctgcttgcgtgtttccttagcccaacgccgcggttttctagcaaaagcggtccacttagcttttgcttcacgtttgtaggttcgtggaggcttgatttgcaactgatgagccatgtctaataacatttcttctagattgagccgagcttgatttagcagcgaagtatcttgtggaaaacgaatttcaattggcaccgcagtagcgtctgtgatcaagacacggagctcatcatctggcaataagctttggatttgttcgcgcaaggtatcactgatgatatttcgcactagttccgttatttgacccatgcgtcgtctaaaataaaccaaggttgagtggttgaacggcaggtcggttgtgtaggtgtctagcccgataaagtactggtaagccggggtatcacgaatagcggtaacgaccgaacggtcggttagatgttctgcttgcttgatcaaactggcaccgtaaagcagacgaaagggtttagcagcgcgcccacccatctcagtaaaaagaagttgataggcttcatcgagctgttgccacgggagcatgtcggctaattgaacccactcattgtcggaagaaagtggcacaccaaggccgttgttaaaggattgaaatgacaattgggtagcacgatgtcgataagccatgatggtttcctccaggaaaaataaaaagtgcaaggaaaacaggcgttagcccatgtttactttgcactaattataatctttactattctttgatgccaataaagcttgcagttatgctgctttcaccagccactacttacgagccaaacggtacggcaatggacatgacgatcgcgacgcttaagcgacacaaagtcgctgttctcgccgctgtcaccagcccttattccaacggtccgatcgaaggggttaaccgcctcatcaagtcactcaaacgatcctgttttggcttcaagaatcagctgaacttcttcaaacgaatctaccaaatcacggcataacatgacaaagacggctccccaaatggagaaccgcctcaaatgataaatttattcttcaacaccagttgacgtagagcccttttttgcatggtttgctttctcgaaaaacttagggccgccaaaacacatacctagatgcgcactaaaagattcaagtattttttctcaattaagtaagtatgacattaaaaactttatcaaaagaggttactagtaggctcctgttgggtgaattacaacaagaaccgttttaagtaaaatcttgaggtcctcggaaatacatgcattgttaatataatgaatgtccaatgcaaccatttctgcaaagcctagatcattacgaccggaaatctgccacaagcccgtgacacctggtacaactatcaaacgttgacgatcgtagtcagtgtattttacaacttctcgtggtaaaggtggcctcggtccaacaagactcatatcaccacgtaacacgttgtatagttgaggcaattcatcaagactatatttgcgaatgacacgccccacgcgtgtaattcgaggatcatctttgattttaaacatagcgccctcaacatcatttttcttaagtagcttgtcaaccattttatccgcgccagcaaccatggatctaaacttccacatttgaaaatttttgccatttttacctaagcgcgtctgtgaataaaatacttttccatgcggatcatctatcttgatcagcacagcaagaactaaaaaaatcccactaagaagaattaatccaatcaaactagctgtaaagtcaaaacagcgcttcgtaattaagtacgtcggtgtcaacgcaccaagatcaacctgttcagcttgagcctgtctatggttagatgccgtctccaaatcttacccctccaatattctaaagtcctaaggtaatagtttctccaaattacctgcttcaagcaagcttataacattcctaatgtgtgttcaacctaaaattgttacaaacttgttactaagcagagtatcattctccaacaaagctaattgacggcactccatcaaatatgaagtaatatgcgttgaaaacactgcgaggcatcttttctcttggtctaaatactctatccaacctttatcaaaccttcaaattttccgacctgaaccaatagcattaaaagttttattattgaggctgattctagctttcacgaaaaagtatgacgttgaatactgttataaaagcaacggctcatcaatcaatagaaaccattctcgatacaaagggcactttttgtaaaccagatgcgacaagatctgacactataaaaacaatcaaaatgattattggcacgaaattcggctcaaagtttggcagcactcgtaacacaattttaagaactacaacatgaataatgaaaattcccatcgtatttgctgcgaaatgatggacaaaacgacttatcaagtcactccgtccgagagtaatcacccgactgtactgtagtggctgttgaactaggccaccatatcttcgacccttgtagtaaatttatagcgaatttgataggcctcaccctcgaatttagccaaaattaaaattggtatagcaaatacccttaacagggtcagcacattgctcaagacgatggccgcgtcaatcttgacggccagtgattcagctgtccgagtgttcaccaagccaagccccagcgtgcccttcataaaagcaaaccggcgttcaatggtacctcttcgattctcggcatcagtatcctcacgccgtttcgctgcatcaacgtgttttggatgccggccaagcttcggaccgcagattcggatacccaaatccttacacagctttaggttctcccgattacggtacagcgtatcggccagtacttcatccggataatgtccatgaaggtcgtaatagtggtctaaagtttccgcgaagtcttggccctcagagaatgcggtgaaatcaaaacgttcaatgtcgactacgccttcacttaacgaacagtcaatcttcgccccaaattcaactttagcattggccttaccacgttgaattgggcgaatgtacggctgttggagactaacaattcggtcttcaacgtggtgagtcttgtgggtatacatgtaccattgctggtcaaatagaattcgaatcacgcctaagcgaatcgcttgttcatctggtagagtcgcaccctgatcgatgaattcgttgatgtaccgcaaatcacggcgcacatattgaagttgggccttgacctgtttatgaaagccaccacgctgttgctttggatgtcgtgaaaatgaggtccaacaatgcttcgcctcgcgtttgtacatgcgtgggtttggcacaccaagttggtgtgccatatcgatcgccatcgcctcaagattcagccttgcttggttgaggaggacggtgtcttgaggatacttgattttgactggcactgcggttgcgtccgtgatgacggtgtccactttgaatgggaccaacgcttcgatcttggcgcgtactgtatcattcatgatattcgtaatcagctcggagatatcggcaattcgtttgcgaaagtgtgccaggctggaataattgaacggctcaaccgctttgtattcggacaacccgatgaaatattgaagtgcgggtgtatcacgaattgccgcaaccaccccacgatcagttaaacccatccgttgttggatcaggattgccccatagagtaaacgaaatggttttgccgcacgtcccgcatttttggtgaactccaattggtatgcctcatcgagagctttccagggcatgacctccgccaactggacccactcattgttagagctaagtggggtacttaaaccggcaccaaaggattcaaatgacaattgaagcgggctgtgacgatagaccatacgataacctccgagtaggttcccaaaaaatgcaaggaaaatgcaggaaaacagctaattccaatggatttattataccgcaataatgcatatattagcttaactgcctgaattatagaatttttaagcagccactactgtaacatcaaaagaagaactgccagcctagattgcaataataaagttaccacctagaaagaggcttgctcactgcttgaactggggtttgccaacggagacattttctaggtttgttattgataagcgctgtggcttgttgaatatcggtctctgaaacctgatcaaactgtgttcccttcgggaaatagtagcgaagttctcgattgaaccgttcatttgtgccccgttcattcgggtgataggcgtggcaaaagtaaaccggtatccgatagcgctttgtaagcgcctgatcgcaggaaaactctttaccgtgatcaaccgtcactgatcgaaccggacccggaaagtccaccatcagtcttgcaaatcccttgagaacagcattttgtgataagttttcaagcttagttgtcgccattaaacgtgtcacccgatcgacaatggtcaaaacagcagcctttgacccgcgaccaccgcgaactgtatccatctctaaatgtcctttttcggttcgccgattagctgactcactgcgaatctcaattgaggtgcctactgcttggttatagcgcgaccgaaggtcttgtcttcttttatgacgtttaccgtgatcaaagagttggcttggctgaaaatcgacttgtctttgataaatccagtggtaaatcgtgtgtggcgcacagtgaacggcataaccgaccatttcaggggaccaacctaggtttagcttctcagttaccatccgcttcaacttaggcgttaaaatcgagtgccgaccacaacgatgccgacaagtatcggcatgatcctgagctataatggcgcagtaatcaccttcagggcaacggtgaagctcatgcctaatagaaatacgagagcggcctaaggtcgcggcgatgtattgaatcgtgtggtgttgcatcagttctatctgagatcgttcaattaaggttataatggccatgggacctgtccttctctctagatggtatgttatgcaaacaccattttagcaagaacggacaggtcttttttcacattttctgggtggtaactttaattatgcaatctaggcatgtatgaaaatcggacccatcgggtcccaggacggattgttagcttggcacaaccgtggattcgcccgattaaccgtggtaaagccaaacaacgaaccgaatttggtcccaagattgatgcttcaattgccgatggcatgatcgatatcgaacgatttgattttaaggcgttcaatgaaagccaagatttagcaacaaccatcgatcattatttcgacgtgcatggttattatcccgatgaaatcttagctgacacactttatcgtacccgcgagaatcgtcagctctgtcaacgactaggcattaggttgtcgggaccacgtttaggacgtaagcctaaaaagatggatgctaagcagcggcaagttgatcgtgacgcagagaagcggcgcgggaaaattgaacgcggttttgccttcatgaaaggccctttgggcctttcattggtgcggactaaaacggtagccagcatcgcagtgacgattgatattgcgatcaatctagccaatctaaagatgctactaaggctttttaatcgaccaattttgatttttgtaaaatataagcaggaatccatcttaattcattatcaaattcacgtttcaggtagccgaaatgttgcctaattcaccagccactagctaagccccagatgcccttagaacttaacattcagtaaaaacatgataaagcattttgtcgtctggcactacaaaaaaagagcagcgcctgctttgcatgcgccgtgtccactatcttgcaaacattaagacgtttcccagtttaacatatttatataagtctcagaagagcttgcaactacacgtttataaagaaatcaggcagaaatctcttcgcccttttttagcttcagataccatcgccaaacttttgcgtatagaggataactaacgcaaataagcacaattgcagctttatcccgcgcaggcgctttacggtcacttaagatgggtttacgtaactttttaacatttgcaataatttgagatcgaatgttttgatgatctgttacaccgttcatttgatttaaggtgctgatataagcgtacagcattcgccgtttgcatggtcgatgaagatcaggatatactttttcaacttcttcagtcattaatctcgtcatgaaaattaggtctagttttttcagcgaaaacgttttatttacaattgaatcatctctgaacaagtagttatactttgcatctgacccaacagcaatcctatttgcagctaaaaaggtcttgtaggtggttgcgatatcttcaaataagcgaccttttggaaaagaaatgtttttaaaaaattgaataggataaagttttgcccaagcggacgtatcaatttggtcatcgtacaacattctctcaatcgcggtatgtgaatctattgacggactgcctttatgtgaattcactcggatcttgccacttctgtaaacagtccgatgcgaacaaatggccattgttgcattattttttattaaaacggtataaaggtactcaatataatcagcatcaacgtaatcatctgaatcaacaaatgaaacccacttaccccttgctacagaaataccgaaattacgtgcatcagaaagaccaccattctcttttgaaaaaaatcgaatgcgcgtatccgtttcggcattcctctgacaaatcgtcaatgaatggtcagttgatccgtcatcaaccaatattatctcgatattattaaatgtttgagcaagcaagctgtctaagcatcgctgcaagtatttctcaacattatatacgggcacaactatagatataagcggctcatttttcatagactttcacaccaccttctctttatgttaatttaatatttagggcgcttcaaaaaagattctcatgtgagttcttaagacgtgtcatttgcacggttgtctatctcatccacaagcgtaatcgaaagacgctgccatgttaggcagcttattagctctatgttcaataatatagctttgggactagtttcaaccagtttcgtgcattcttagaaattatgctatgtttgaattcttaaacctcaaagctagatttacttggaaacttatgctcaagtgtattaatgatgctgtcagccacctgtgcttcatcctcagacgcttgcgtatcattgatgcatattactgaatggatggacttttcaatgtccctgcaaatctcctcatgcatcgtctgttcataatactgaccaaagtggtttgatcttggttggaattcattactttgtatctgccagtatctaaatacccaatccgttaggtctgagggattcctaaaccgatgtgcactggtttcgcttagtttctccccttcgagtgaccatactttttcaaatgttttttttagatacggctgtggcgtatgggggttaaagaaacctggaatagcatgccacggcaaagtgagaaatgaacgaaaaagagctttcccatacttaaagttaaaaactttaaatggagcttgttttattaagctagttttcgagaagtacttattgatcatcattgtattgttcaacagaagatggctaaaagggtcgtcagctggaatcaccgaatatacagccaagtctctgacaatatttgaatttacgaaaaagtcttgcggctttactggtttattaatgagcatgtcgtcattaaataaaataaactgatcactcaaaccacttattcgatgcaagtttaacaatatcgggttagaactaaaagttggcaaccatttctctggaatataatctttgtgccgaattttaacgagtttgttgttagaataatccagccattcgggccattgatcattagtaactaagaaaactttgttcacccaaggcgcaaaacgatcaatggaacgaaataaatacttcaacaaaccactatctcggtaccggtactctccattcaactgtgtcgtcgatgtgataccgcccctcttattttcttgaaacaattgtctttccctttggagggttgggtctgccccgtccacccaaggaataacgatatcaattttcatatttttcctccaaacatcgaacgttactataagtatcctagattgcataattaaagttaccacccagaaaatgtgaaaaaagacctgtccgttcttgctaaaatggtgtttgcataacataccatctagagagaaggacaggtcccatggccattataaccttaattgaacgatctcagatagaactgatgcaacaccacacgattcaatacatcgccgcgaccttaggccgctctcgtatttctattaggcatgagcttcaccgttgccctgaaggtgattactgcgccattatagctcaggatcatgccgatacttgtcggcatcgttgtggtcggcactcgattttaacgcctaagttgaagcggatggtaactgagaagctaaacctaggttggtcccctgaaatggtcggttatgccgttcactgtgcgccacacacgatttaccactggatttatcaaagacaagtcgattttcagccaagccaactctttgatcacggtaaacgtcataaaagaagacaagaccttcggtcgcgctataaccaagcagtaggcacctcaattgagattcgcagtgagtcagctaatcggcgaaccgaaaaaggacatttagagatggatacagttcgcggtggtcgcgggtcaaaggctgctgttttgaccattgtcgatcgggtgacacgtttaatggcgacaactaagcttgaaaacttatcacaaaatgctgttctcaagggatttgcaagactgatggtggactttccgggtccggttcgatcagtgacggttgatcacggtaaagagttttcctgcgatcaggcgcttacaaagcgctatcggataccggtttacttttgccacgcctatcacccgaatgaacggggcacaaatgaacggttcaatcgagaacttcgctactatttcccgaagggaacacagtttgatcaggtttcagagaccgatattcaacaagccacagcgcttatcaataacaaacctagaaaatgtctccgttggcaaaccccagttcaagcagtgagcaagcctctttctaggtggtaactttattattgcaatctagggtattcaaaccatattcgtaaacgcttgtacgctgcaaaaagaagaaggccgcttaattgagcgaaaactttatataagattgtctaggagcattggtcagtgcaaatatataatgagtattataagaatggttgtttttttacaattataagaagctgcaaaaaaactaaaatctatatgatcttctcttacagacccactttgcagaacacaaaacacgctatatatcgactaatttaaaaaagtttttccaaatcatttgcttgctgaaaggtgatattgttcaataataggatgaaaaacgattccagcaaagaagccatgtaacaatattcttattttctttaatcgatcagttccgtgaactgagaccaatactactttctttgaaaatccgtacaaaaatctcactgtttctttgagtcccattttttttgaaatgtaaaagttattacgaacatcgtaaaaatatctaggaagacggtcttctctatcagtgatgatatcaaccttttgattcgtacccatcttgtgtgtgacgagactatcagtgacacagaaactatcatattcattggagattcttttcgaatattctgcatcgtctccccaaatgaaaaagtccgctattggataaccaaccttcttgacaacattagcgttgatgaacattgatacaaaagagctatgttgaattttaaccaaatttgaagaacgactttcattccagaacttcgacaacttgggaatattcattaaagcagcactaccatctgtccagcgaacattgctggccagaatcccccactcaatgccagctgactctaaatgtcttctggcatccattaacggaacaatggtttgttcgtttacaatacaatcgttatccatcacccaaattgtatctgctcctagaaacatcgctcttttcatgccgtgattaaacccggttgcgccacctaaattattcttctcgttcaccacatccagcatcggctgctcttcagttagttgttcaagataggcacgggtatcatccgtactagcattatttaccacaactattttataaagatatttttgacagagtattaactgctgcacgcactcctttagtaaatcaagtttgttgtaggttacaacgactgcaatacatctagaatcactttggttcatattactacctctttattaattttttattaaactgactctcaaagtctagatacctttaattactgaattgaattgatcatttcttaaagctaaagatccaagtaaaatgatgaaaatattataacttgcaaacaagaaccatggatctccgaaagcttccatagctaagcaaagcaaaagtaaatctaagtaaaagtcatgtatctttgcaattcgtcttgatatatatacccacgatgaaataaataaaaagctggaaattattccatatttaacaacatagcgcatcaaactactgtccaatgtttgataagtcctaccaatccaaataaaatcggttgattcataaactggatgtccaaaaagagtcaaaccatattggtcaagatatgttctacctaagctcaaacgatttgaaagtaaagcattaattcttggataagaacttacgttgtaacttaaatacaaaatcaagatggtgaggacaggaacaataagtattgtcaaaaaataaagtgttttccattttattttttgaatcctaagttttgcagcaataaaccaggttaccaggcaaaagattgcaattaggaaaggtgccttcgtctgggtttgattgtaagcccaaaaattaacaaataataacgctccaaataaccaccatttgatttttcctcggacgctccataacaaaagaaatgttatgaacagcagagtatgcgccgcaaaagaagcccaattatagccaagatagaatctcagtctactttgagaaacttcaacttcattaggaattttagaaagcagtgccaagccaatcaatactccgttgattataatccgatagcttgccagcgaagaaaacacttttccataatgaataccaatggatcccaacgataagatcccaatgtcaatccagtttgcatcaccggccaaaagtccattatttagcataaaaaaagccagaattaagcttgttatgataaatcttattgcatcaatatgaagaaagtcgcgaagaaaaaaggaaataacaactaagcccacacccacagcacgaaaagctaaaggccagaattctgacacataatttgaaatttcagaaaacttaataaattcgttaagagaccagatcgcgactccaacaaaaaatacccagtcagatgcgttgacgatgctcacatccttttggggtttaagttcagtattctgaaaactcatgttatcttcttcactggaaactgtttgcatcttcatttttctatccttttcggtgagcattaacaacggatgctgtactaacttatatctccctgattccttattttatatgcgtgttgaattgccgcttctgtccggtaaacttgttcatcaaaaagatgagtattttttttggccaatgattggactccataaattgtacagggcattcgccaacttgcttgtcattggcaataacccacacgtccataaggatctcggcaataaaacccaaagctcgcttctcattgcccataagcttatcaaaatctaaatttttttcaagagtacgtaatgttggaaatagccatgaacaatattggttaaaagtatcacgtttcataatgaacatattaaacatatgagcggaagtgctatccaaaacggtttgcagagcccgttggtatgattcagaaaatgaagaaaacacttttttcaaagcctttagctcctcagcatcatggctatgtatataatgactttcaatcgtctcaatgtagtacttacgttttgacggcagtacgacatctccttttgcaagcaaattcagaatctgttgttcattgaggaggttgctaaagtcttttctaaaggatttctttgagacaaagtatcttcgatagtgattcaatccgacgatgctcgcatcagaattcttccatgcccaataggttgctgttaattcgttaaaatgtggattttctagagaaatattatccccagtcgcatctgactgaaaattcttcggaatatccttatgtaaggctgacccaacaaaaatcggaagataaatcttattatcagtcggcatttcatattgcttatgactagctattaacatttcaattttcatctgcaaccctcattcgtaataaaccttattattttattttgatcaagatctcactgttatatcgctgcaagaacttagacggaacactttgaactttgtcgccgttttgtatctcgttcacatatttataattcagaggaactttttcgtcagcttgcataagcatccaggagtactcaagatcaaggtgtccaatatcaagaacttgaaccgaggtttctaaattcacatcatttgctaaaactgttgccgttggtccaagagatacaagcaccagtatatctgaatcgtcaatgttcttaactacctcagtaatagcattcaaaatctgagcatagtgttcaaatgcgtccttcgctggacaaataatcctttcaaccttggctgcattattgagaagatcattgccaactccaaatctagtttcagatccttcaacaagaatcacatgacgcttatcccaaatttgcttgattagtttaaacagacggtcaccttgagacctatccttatagatcatgtatggccttgtaaccaaagaatctaagtaagttctttgggagcttaatgtgcgcacccagcgatatccatggtggcctaactgtccagcccagaaaaaggcatctaaccgcctatactgatttaacccatcaaacgcatctggaatacagacctgaaatccctcccggctagtcttgatcacttttaataatgcagcggctaattcggatgagtttttttcaaagttatctggctctcgatctttgaacatccatttgaactccccatccccaaatctagcgactgataaacgttctttaaggataatctgtattgacttctcaatcggtactactctgatttgcctccgcgtgattattaggtacatgcgaaaaacagcatacgcaattagttttaccaatccaatggcgtttattcgaatatttctgtcaaaacgctgcttagtcttcaatctttttccccatggtctctttattcggcaaattaacggcaggattaaagaaaaagccgttccatgttcccgagaaggctgctcctagacgagttagtcgatgatctttggccgcaagcgaacctaaccctgtcactacattcgcaagaatcattttaacaatgtccttcttactcccatagtgacgcttgatatagattaaattgcgatacattgacttgaaacgccaaatacgatctgactgaattgtctttaggctatcctgcatcaagttgtaacttgttttgtgaacagcgatactgtcactgacaaagaaacttactttaaaggatgacagtcttgtcgtatattcggtatcatcaccccaaatctgcatctgacccaacggtaggcccaaattgttgacgttttcttttggtactaggatggagacgaacgtagcggagacaaccccaacaagtccttccattatcttatctggccaattttttgaaacatgagcaatgtttgttgcagtaccatcagtccatctcacatttgaacatagaaatccaaattcattgtttagtaatcttgcctttttaattaatgcggaagaggctcctatatttggaatagtgtcatcatccattatccaaatgtaatctccatttccttcaacggtggccaggttcactccatattcaaaaccagcggctcctccaatgttatcgctaagtgttgttgctttaacaagggaatcatcaatttttgcaagatattccgtggttccatcagtgctatgattatcaattacaaaaataccagacaaattctcgcgctgaccgagtaaagattccaaacattcttttagtaagggcaacctattataagttaccacaaccacatctattattttccccatcattttcccccacgtgttgatctcttaaacaattaacctattcttggattcttctcttgaaaaattcaactgaattggccgtgaactttctcgcaaaaagatatttcggattctctattaatgaaacatcgtcaacagttagatatcgtggtgttaaattatgtttagatttccaaataaaatctacgtaacgtaaattttcagatagggtattcataaactgtgtattagcaatcagactctggataaaaagctcatcacaacaataagtataattaaagtgtttggtaatccaactttcatggctcaaaatatactgtaccaaatcatccgtaatgctaaaccactgagatccagactgaaccgtaattttccgcgccctattaatgccaatatatcgctgcacatagcacgaaaaaaaatcaatatatttgaagatgttccgttttttcccaatgaaacgatcctgaagaaaatggtattgttgatatctcaatcgatatctatcaggattttgattcttaagacggtcactaacctctaaaaaatttttacctttattctgagcaaaaaaatcatctattcgttgattcgtcttaacaggaaaatcctggcctgataacaagtgatagtaagcatattcatgttttgtagaggctgttctcaataatctcaactcaattttgaccaacgaaaaccctccccatgtgcccttcatcctatcgataaaaacaacacttgagaagttaactacttcttctattctttgctcgtcaattaagccggcctttaaatcaatatgaataaaaaaatcatgttgtcggctgtctagttgatggatgatctccaataatgtctcatcaatcttaccagccatgattaaaaatgcgtgtctcaccgttctttcgccctctctacttttcccagtattcggctagataactcaacaaaattagatggttaattaaactctatcaggtgaagtgcgcctcattttatagttgagagattcgaattaaaaaactacttcttcgcataaactcatctgtttcgaagaatcttagacgctaatatttccccttgagaatttcaacatgttttgtccatttgcattagtaaaaatttaaatgggttgttaccggtgtacctttctaaaagacgacatcatttcttgtaagactgtaggacggagcattagcaaagcgattgtatatatcaatgcaccatacatagtagctcccagtagtgcaacaaggcttgacagcgataagactgaaataaaaatacgcacgctcagacccattatgagcgcagctaggaaatacttccacacttctcggaaaataagtccgagacggagttggtctttcactttaaataattggtatgccgtcaccaatagttccgaaaaaactgtcgccaccatggcaccattgcttctccacagaagaataaaaggcacattcagaaccatattgacaactgctcctagcacaacagacgttgtaaacggcgcaagttggttagtaggaagtaagtattgaactccagtcgcattactaattccaatgaagacaataacaatagattcaataaccagcaggtttgaaacaggatcaaaaccattaccgaagaatatccgtgtaaatattggagcaatgcccgccagaccggcagtcattggaaatgcaattacgagaataaagtgcatcgatttattcaacgaatcttcaacttcatcatttctgccttgtgcaaaactatgggcggtgtgtggaagcaaaacggttccagtagctgtcacaactgcgagtataattttgacgattttgtcagaattatcgtaaaatcctgatgcttgaacaccaacaagtgccccgagcattgttttattaacttgtaaataaacttgagttgcaatctgaggtacaaacatttcaatggttggtcgtaaatgattgattatttttaagtctgaccaatgtggaaatactacataacgctttaggtacggcatcaacgttaggttacctaagaactgcgatccagtgaggattaagatgtatagccaaagatcatttttcgtccgaacaagtaaaaaaatcaaaattaacgaaatgattttaactaacgtatttcttaatacagtgatgcgaaattcctcaagcccctgaaaaaaccaagaaacgtcgattgcggttgcaacaagcaagagtccttgaatgatgtaaaaagtttgatactgtccagacaacaggataaaccctaaatagagtaaagttgaaatccctgtagtcacaagtctgagaaatgttaactcccaaaataaattggaaagttgcttcggcttatcgcgctggtatgctacttcgcgattaccatacattgttagtcccaatgttcctaatagaacaaagtactgaacaattgaatttgtaaaagcgttaatgccgattcctgtaggcccaagaacgcgagaaacatacggaattgtgacaatcggtagcagaaggacaaagacttgatagcccatattccaaaggagatttttgactactttcgtgacgatccacctcatttcaacggaatatcgcagtcaaatgaaaagctaagtcgtcaatcacttgttctgagcagcaaaaaagtccccttgcagaaattgtaacgccgcagtgataacctgatccatgttgtaatatcgatacaatcctagacgaccaccgaatgccacttgaggagtttcttgagtcgctaactcccgatattgtgtaaatagatggttgttctcagagttgttcactgggtaataaggttcatcgcctttagtccagttagctggatattcatgagtaatgacagttttaccacgattgcctttgccaaattcgaaatgcttgtgctcgataattcgtgtaaacggtgtctcagaatcagtgtaatttaccacagcattcccttgaaaattatccgtatctaatacttctgtgtcgaatctcaaacttcggtactccaaagtccccagctgataatcaaagaactgatcaatcatgcccgtgtaaatcaccttgtcgtaacgatttaggtagtcctgcttgttctccagaaaatcagtgttaagcttcacagtaatgttaggaacatctaacatcttttcaacaatctgagtatagccaccaactgggattccttgataaaggtcattgaaataattgttgtcataagtaaatcgaactggtaaccgacgaataataaatgccggaagttccttcggttctctgccccattgcttagccgtatagtccttaatcaacttactataaatatccgtacctaccaaagagattgcttgttcttcaagattctcaggttttttgccagccattgctgcccgttgttcatcaattttcttctctgcctcttcgggcgtaatgactccccacatcttattgaacgtgttcatgttgaatggcagattataaatttcacccttatagttcgcgataacttcattcgtatagcgattgaatgtcgcaaactgattgatgtactcccaaactttttgattacttgtatggaaaatatgtgcaccataccggtgaacttgaataccttcaatgtcttccgtgtatatattgccagccaagtgatctctcttttcaatcacatcaaccgaatcgccctttaatgctcgttctcgagccaccgttgatccaaataaacctgccccaacaactagtaatttcatcgataaatcccccaaattggtcttgtttttgatactaaactacagagtttttctaatcagtctgtttacttgttacttttgactttggtatccatagccataaccatagccatagccatagccatagccatagcccctatcaccatgtttagctttaacacgctctactgatccaagaattttagcctttgccaattttaagacttcaaccgtgcgtcgtaagtctccctttaatgttttaccaatgttggcaaccacgataaccccatctgtcttcggaaccaacacctgaacatctgagacggccaaaactggcggcgcatcaagaacaatgatatcaaagttttgacgtgcccagtctaatagatcgcccattcgcttggaattcagcaattcagaagggttgggcggaactggaccagaggagataatgcttaaattattgacaaatgtctcctcaacgacctcatcgggttttgttttgcccgttaacacagtcgtcaccccatcaagattaagctttctgaaagtggcgtgaaccgttggccgacgcagatcagcatcaataagtagaacttttttgcctgcctgtgcccatgttacggcaacgtttgcggaaaccgtcgatttaccttcagacattgctgaagaagtaaacataacaacttggcatttatctaaagcggcgcctgcaaactcaatattcgtccgtacagttcgaaactgttcagacacaacatgtttcggttcagcaaaagcaacgagcataacaccatttttttgtgtttcttgatcttcctgatgacggttaaaaagcgttttgaatgaaaatttcactttgacttcctcctttagatccgacgacgacttctctgagggaagtcttgaacaccgatgtcttccgtcgtctcaccatcatctgtaagttttgttgcctctattgcctgatccatgtctctcatacgctgaacatagttcacaacacccaaattaactaatcccagatcatcagtaatgaagtcaagatccttaattgtttggtctgtaagttcccgaattaatccccagataaaggcagtcaaaacccctaaaaacagaccagccagagccatcattcttaaacgtggagataccggtgttgagcttgctgtcgcttttgaaactactgagacgttcgaaatactcatcattttagcaatcttagtctcaaatacttttgcaacctcgtttgcaacatcacgcgcgcgaactggatcagtatctctaacgttcacagtaaacacttgagaattctgcaacgttgacacggaaaccatcttagcaagatcatcctcagaaatatttgagtatttagctggcttcaacttatattgtgccggctgtgcttcttccgtcacatattgctcgcgcacaccagtcgtcgcattatatctagttccatagacagctttttttgccttcttagtaagaactcgttgcgggcttgttaactcatccgcgaccgtctgtaaaacaacaggtcgcgtgatgatatccttgtatgtattaatgatctgaatgtcggcgttttgagcattcaactgcatatttggatcattctgctgttttcgattaactagcaatgacgtatcagactcgtattttggcgcaatcaaagccttagcaccaaaataagcagccgccatcccaagaattccaagaataatcattgcaacaaagctgcgtttaaatacattccacaactgcgaaaggtcgatttgcttgttcattaactctttccccacctaatcccgtaatttatatccaacactcaaaatgcggaccacaagcagcgcagcccgcatttttaaaaaagactttttaaaaccctactccaaagcataataccctagcatgtgtgattaagtctagctattttgggtgactatcatgtttttggtctcaatagtactctgtcctgaatccgctctactccccttttaactaaggttgtttcccataaagttgaatttgttacagtctctttacaatttcttccaaaccggatctctagcttagtgtaagagcgatacagcttattgagctaaatattgcagtctcgacaatgaacccacagtatattatcgcaatatctgtagacgactaacaaacatctcagagaatcacacagaatatctaaactcaaaatattaagtttgaacccttcgttattaacgatacgaagggtatgtacaaataatgaacagtagtattatctctaagctaatttgactttcaacagccgccaccaatcctgatgtccaatataccaagcaatagtgtctactagtccggtctcaaaagcacactctggcttccagccgagcttctgtttgattttcgttggatcaatcgcatattgccgatcatatccagggcgatccttaacatatgtaatctgagattccggcaacccgagctgcttgacaataagttgaacgatagtgttgttgtcgtattcattatgtgcaccaatgttgtaaatctgaccactcttaccttcacgaagaactaaatcaacacccttgcaattatcacgtacatacaaccaatcacggatgtttttaccatcaccataaatgggcaacttttctccatccagtccacgtgtaatcatcaatggaatcagcttctcagggaactgatatggtccgaagttgttcgtacttctagtaatattgacatgtgtaccataagtttcaagataggaacgaacaagcatatcagctgaggctttacttgccgcatagggtgagttgggttgcaaaggcgaatcttccgtgaagtacccagtcggtcctaatgaaccataaacctcatctgttgagatctgtaagagcttaatatcgtgtcggtaagcctcatgcagtaaagcaagtgtcccttgcacatttgtttcgacaaagatttccggatgcaagatactgcgatccacatgagactcagcagcaaaattcacaatggcgtctatatgatactgttcaatcaaataagccactagttctcgattattaatgtttccttgaacgaagatatgacttggatcatgctttaggtcagttaggttatttttgttgcccgcatatgtcagcagatcaagattcacaattaaatccgcaggatgcagctgacgctgaaagtgaacgaagttgctgccaataaacccagctccacccgtgattaacaagttcaaagtttagtctgcctcccttattgcgagatgtatttcaagttcatcggcactgaatcttcttcacaaaatctcaaaaacataaatagctttcctcgtctatcgactgctgatcacagagattttaccgttggaagccaatggtcagtatcaatcataatatacgatgcttaggcatatagtacctagaaaacctcttttaacgacggatttacaattcaagtgcaacaaactagtcaaatagaaaagactcatcgcctgagtccttgtaaaatggaatcaccacaagaccaactacaaggagaactcgactatgagtccgtacacccatcttaccttaaaagaccgtgaatcgatactgcttggtatctctacaggcaaaactcttgataccatcgccaaagagataggtcgttccaagagtacagtcagccgtgaaattgcacgtaacggcggctggcggagctattcggcagccacctctcaggaccgctaccggcgggttcgcttggctagcaggcgtcctcggatcctcgatcgaccggggactcgtgacgctgtcattcgatatatcacggtgctacattggtcgcctgagcagattgccggtcgcttgtcactagaaggcagtcctattcgcatcagctattcgactatctacagaggtatctacctagataatctcggcgttccattgaagagccatggtgctcgcgggctaccaaggctgcttcgacaccgaggcaagacgcgcaaaatcaaaggcaccataaatgaacgccgggggcgcttcaatgacgtgccatcaattcacgaccgaccccggtcggcagaaaatcgcagctggtttggtcactgggaaggcgatacagtacgcggtaaaacaggacactctgcattagtaacattagttgaccgtaaatcacgctatctgctttcgaagcgaacggccaacgcaaaagctgacactgttagagacgtcatgattgagctgcttggtgccttaccagctaaccgagtaagaacagtgactcctgaccgtggaagggagtttgcccggtacagggagctggcagagcgtctgaatacaaaggtcttctttcctgacccacacgcgcctcaacaacgaggaactaacgaaaacaccaacggactgattagagaatactttcccaagaacacagacctagaccttcagagcgaccaggaaattgagacttacattgaacaactgaataatcgaccacgcaaggtcttaggctggaagacgccatcagaagtcttcatgggtaaaaagttgcacttgagttgacaattcgtcacaaaaataaaagcctattttaggcctatgccacttcaatatgacagtctctttacaattccgcaaaaacccgtcagaatgaccctaacttgtaaccagactaacctgatttttagtttaaaatataagcaatgcaacttttgggggttcactaaactatgaaaaaaaacaagctacgtctacgtgactggctattaagtatcgcgttgggattggcaattgctggtgtcgcggggtttttctacgtcaagcattatcagtctgagcaggcgattgcggttaaccaatcgacgcgtcagcgcattcagaaggattctaaggcgaaggtgaagaaggaaaaagtactgaatcagtatcggctttatggcttgactgacagcgagattaatgcggccaaaacgttgccggtgtcggcaattggcgattcgattatgctggggagttcggcatatttgaaggtgctttttccggagatgtcgattgatgctgaggttggccggcaggtgcaagcagcacctgcgattattagtcagctgaagtctagtggtaagttggctaacacagttgtgatcagtttgggtacgaacggaccgatgacagaggccgacattaacgggattctggatcagcttggtaccgaacgccaagtcttctgggtgacggcgtatgctcccggaaaggcgtggattgatccggttaacaagttgattcatgcggcagcgaaaacccatgccaatctgcatgtggtggattggtattatctagcaggcggcaatgacgactggtttgctgatgacggtgtccatccgaacgatgctggccggccgcattactacacgttgattgctaaggatgtcatgcagacattaaaaaagtaacaacgaaaaaaactcatcacctaggatcagcatcttgctaaaaaagattcagggtgtatcccctccattaaaaaagcatcgagacaattgtcttgatgcttttttgtatttaaccaatatttggtcaaaatcaggtgcatcggaagcctaacccttgcgacaacttttgaccacagcaatcagacctgcttgcccttctgccagatcgaaaaggttcagcgaaacctttcctgccagtaagcgtttttttctataggagcctctttcaatagccttatcgcttacttatccaaatccacaaaccgcgtcaaaatcatcatcacaacgccaccgacggccatcgagatggcttcgccaagcgcgatagtcgcataagtcggccagaatgggactttcgtgaggatggtcagttcgccggcaatggtgaacatggataaggcgaaaaggatgcccatgatggtgaatttagcccattttggctggacgagtttggctaaccagcggctgatgatgatgaagacgagcgtgccgagggtgccgattgggacatcaaggagtgcggttggcgaggttaaattggccaaaaaaacacccagcgtgacggcccagacataacggcggttgaagagtgccgtgtagttgagcatctcggagaaccgaacttgtacgaccccgaagctgagtggactgagcatgagggtcatcacgacataaatggacgtgatcatagaggttttggcgagactgacgattgaacgatgggtggttgaagttgtttgcatgtttgttctcctttgtgctatgccagtagtaacgacgatcaaaggaaagtaagtatcgtcgtggaaggattgccttccgttttcagtttcggtgttgcaatgcattaagtttacttttcgagccagccgccgtcaatgggaatcacggttccatgaatataatcagcagcatcgctggccagaaataaggataattgcgcgacttcctcgggcttggcccagcgtttggctggggtttcttgagcaacccacgcagccattttcccgtcgccggcaaaatcagcggcgttcatgggcgtgttgatagcgcctggtgcgagagcgttggcgcgaatgcccttggcggcgtaatcgaggtctaattgcttggtgaggccgatgacggcgtgcttagcagtggtatatgccacgccgccaccacctccgactaagccagcgatagaactcatattgatgaaaacgccgtgaccgcgagccagcatccccggcagcagcgccttgatcattaagaactgactggtgagatcaacatcgagaatgtgttgccatgccgaaagcgccgtatcggtcacagtttgataaccatccaacacgcccgccgtattgcagacaatatctggctggtattgagccgcaatcgctgctgccgtggcaggatcgctcacatcggcctgaatggcgtctgtgaggttgctaattggttggaggtcaattcctaccacagtggcaccagctgcctgaaaagccgccgcctgcgccgcaccgatgccagaagccgcgccggtgatgatgacggtcttgtcggtgaagtcgaaatgcgtcatgcgttcacaagctgccaatcttcagccaaaatgtcacagtcagtcggtgaccagagactgaaagcttcgtcggcagttttgatcaaaaaatacggattcaaagtgtcgccttcgaatttgccttccggaactagttgcacatacaactcagtaccttcccagccggtgcgaacggccttcttgcgggctttaagggacggtaaaattgcttcaaatgtcatgtcgatcattctccttcttttaaaatgcgttctccagatggcggtcggttattgtgaagaaagcctgttagccgaaccaatacttgagcaactattcagtgccactttgtcaaaccaagctaaccgtgccagttcgcgctcattgtctaaaatcagtgcatttagtatacgcgttttaccagctgactgacaacgggttgcgccatccttttaaggtcattctgacatttttgatatcaaaaaagaacagcctcaagtgacagactgttctaaaaaggtggtacttacaggttaatcacctgcatgagtacctcggaaacacgcgcccgttctttctctggtaagtgggttaagtatttcaccaccgctaatgtgctaatatcgctcatttcgggagcaatgaagaagtcgcctacctgcatatttaaagcccgcgcaatgtcggtcatttttgacgctgatattgttgacgtctccacgctccattcgcgaaatcagactgatcgagacgccggatcgctccgccaacttctcaatcgtcaagttcaaactgcggcgctgttggtgcaccaatttcccgatattgtctaacatggtttcccccacctttaatgtgcggcgttatgctttaacattagatgaaacgccgggctatcaaaagattttataatattatttaataatctaaagatggcctattctcacagaacataaccgcactgatcccccacatcaactcaccaattcttgctctataactattgtaaacgctcgcaatgaggaactgccaaaaatcagcttaattaattaaaaaatacacaataaaaaaacaatgccaatttattcagcattgttatttactttccgcggttactggcacaaaggcccataagctgccacgtgtgaactgttcgccatccgaggtgtccaattcactgatactattattcggcggaatgcgcatcgcatcacgcgcagaatcgagatcggcaccgaggtatgtgcttaataacaacatgccgattaagccgtgcgccacaacgagcactttgccgtctggatgggcatcataaatccgattgattgcccgccgtccacgttttaacgcatgggcaaatgattctgcaccgatacgctggttatcaaacgccgtcaaatgatgataataatgattgatctcaggatcatcttgcactgaggcgagcggctgaccatcccatttgcctaaatctacctcgcgcaaatcacgatccgtcacaattggcggttgaacaacccggctttgggccacaattaattcagccgttgtttgcgcccgcggcatcggactggcatagatgcccgcaaaaccagtcgtcgccaaaaagcgtccaactgcgatcgcaccatcgcggccactcgctgtcaacggcgtatcggttcgtccaccgttaaatcgccgcgccaaattcgtttccgtctgtccatgccgcacaaagtaaaacttggtcatctcccgcacgctccttataaacacgttcatcaggccagcaaccggtctggcgaacgttctgtctttgaccatagtgtagcagaagcgcaccaaattagcggcaataatcagaaaagttcagcccgacttaaccaaaactgtaacgattatgtctattacgtcagcattttgacgacatcaacgacaagaatgtgcttactcgtctagaaatgtgtgggtaagacatttgtacgcaaaaagccgaacatgcaagtttcacatgttcggcattcttacgcgatcattgaagcacagcgctcagtaggcgtttactgggcagctttaaccccttgatgatccgcttcggcttcagctttataagccgccacttcgtcatcagcggcaaaaatgtaatgttcaggataaacctcaaccatcttacgtttcttgttgtcgccttcgaccttgctggcgtcatacggcagcggcacgcgtctgcgctcaacatctggatcaggtaccggaatcgctgatagtaaactcttggtgtaagggtgtaacggatgactataaacttcatccgccgttgccaattcaaccaaccgtccataatgcataacagcgatacggtctgagatatacttgaccatcgataaatcatgcgcaatgaacaggtacgtcaacccttggcgatcctgaatgtccttcagcaggttgacgacctgcgcctgaatggaaacgtccagcgcgctgatcggttcatcggcgataatgaacttaggctgcacggccaatgcacgggcaatcccgatccgctggcgctgaccaccggagaactcatggggatagcgagtcgcgtgatcagcgtttaaaccgacttcttccaacaactgctcaacttgatgatcgcgatcagcgttgtttttggccaaatgatgaatatcaatgccttccgcgatgatgtctttgactttcatccgcggatttaaggacgcataaggatcctgaaaaatcatctgggtggcccggcggaaagccagcatctgtttggagccatttttcagtttggcaatgtccttgccattgtacaaaatctcgccgctggttgggtcgtacaagcgaatgatcgcccgaccagtggtggttttaccagaaccagattcaccaaccaagcccaatgtttcgccctcataaatatcaaacgagatatcctgaatggctttcacttggtcttttttcccggcattgaaggtttgaaccaagtgtttgacggacacaagaacctttttgtcttttttgtcgaccacgttagttcaccaccttttcatcttgatgtttacttgcccataaggcatgtcgccgcgcaatttctggcggtaattccactttcggtgcgcctggtgctaatagccaagttgccgccgaatgggtcggtgagatcttgaagaatggcggttcctgttcgaggtcaatcgccatcgcgtatggatttcgcggtgcgaacgcgtcaccttttggcggatcaagcaagtccggtggtgtcccaggaatggcgtacagtcgatcactcttggtttcaagtgttggcatagcttcaagcaacccccacgtatacggatgctgggcattgtaaaagatttcgtcaaccgtaccatactcaacaatcttgccagcatacataaccgcaacacgatcggcaatcccagcaactacgccaaggtcatgggtgatgaaaatgattgaggtgtcgatcttcgactgaatttctttcaagagatgaataatttgtgcctgaatcgtcacgtccaaagcagttgttggttcatcagccagcagaatctgcgggtgattgatgatcgcaatggcaatgacaatccgctgacgctgcccaccagagaactgatgtggatagtcctttaagcgaccgccggcatccttgatgccaaccaaatccaacacgcgttccgcttccttgagcgcatctgctttactgattttactatgcaacagtaacggctctgctacttgttttccaatggtcatagttggatccagtgaggtcatcgggtcttgaaaaatcatggcgacatcattgccacgcattgcattgagctgtttctcggattttttgagaatgtcctcgccgttaaacagcacttcgccatgcgtaattttcgcattcggggctaacaagcccatcactgttcgtacggtaacggatttaccagaaccagactcaccaacaatggccagcgtctcacctttgttaaggtcaaaattgacattgcggatggcgtggacagggccggcataggtggcaaagtcaatctgtaaatcttttacttctagaattttactcattttgccacctcctaatgttcactgcgcggatcaaaggcatcgcgcaaaccatcagccagcaagttgaaggccagcatcagaatgacaatcacgatcgccggatataacagctgatatggcagcacttgcagattcttttgaccatctgacagcaaggtcccaagactagcagtcggtgctggcagcccgatcccgatataactcaggaaggcttcaaagaagatcgctgtcggaatggtgaacatcgtttgaatgataatcgttgaactcagattagggatcagatgtttaaaggcaattttgatgctcgactcgcctaacgttctagcagctaagacgaattcctgatcttttaactgcaacgtctgcgcacgaatgagtcgagccatggtcacccacccagtgaaggcaatcgccaagataatggaggtcaagccaggacggaagaccagcagcatcagaataacaacaaccaagttaggaatactggagatgatttcaataacacgttgcatcaacgtatcggtcatgcccccgcgccagccggagatgatgccgtagaaaaccccgatggtcaaatcgaagaaggttgcgacaatcccgatgaacagtgaaactcgggtgccgaccatgattcgagacaacaggtcacggccaaggtaatcggtgcccagcaagaagtagacatttttacccataccggcgtacttgttttgaccgttcatgtagccgttcaaacctggcaaatcgatacctggccatttgggcggcaggttcgcatagttcaggctttgcttgtttggattagaaggtgataaccagatagaaatgatagaaatgaacgcgatgaaaacgagcacccacagggaaattactgcggccttgtttttcttcaatcgccgaatcgcatcttgcgtgaacgtcagcgcaggcgtggcaatacgttcctgttcagccgcatccactttaacatgcttgaatgcatctggacttaatttacttgttgccattagtttgcctccccgctcaatcggattcgtggatcaatgaagccgtaaagaatatcgacgacaaggatcacaaccgtcagcatggcactgtagagaatggtcagtcccatgataactgggtaatcgttggtcgtaattgacttaacgaattgttccccaattccagggatcgcaaagatgttctcgacaaccagtgagccgaccattaagtcaacagccattggtccgatgatggtcacaatcggaatcattgagttacgcagcgcatgcttggcaacaacttgccagcgtgattcacctttggaacgtgccagttcaatgtaatcagaactaagcacatcgaccatttcagttcgcatgaatcgggccgtttgggcaagcggtgcgatcgccaaggcaactgtcggcaaaatgctataagagaagccgccccaaagtgctactgggaaggcgccagttttgaaagcaaaaagctgcagcagtgcggcgaacacgaagttaggaattgagcgaccgagaatggcaaaaatggtagcagtcgcgtcaacccatgtgttcttgcggatcgcggcaatggcaccaagcaagatcccggcaagtgtgccgacgaccatcgcctgtgcgccaatttgtagagatggtccaatccgagaagcgattaagtttgacacggtttggccaggaaattgataggacattccaaaatcgccatgtgagattccgacaatatacgttaggtattgcatccaaaccggcttatccaatccatactgtttcttcaaaatcagcagttgatctgctggaattttggggttgttaaacggcgtccccggcaacaacttcatcaggaagaaggtagcgctggcaacaataaacagtgtcaggagcaggaagccgatccgttttaaaatatatttgaccatgattcactcctgtttatgggcacacgccctgataagcaaacagcgttgtccgccgcagaacacgagacaacgccgtttgtgagaactacttatttgaaactagtaggcagttattcgtaactgctcacgttttggtttaaaaacgcggttgttagaccataatccgactaagttctacttaactttcgcattcacaaagttgtaggaattggttgggttgtaattcaaaccggtaatggtcttacgctgcaaggttgtttgtacccgttgatacagcggtacaacgccttgttccttcgtcaacagttcttgggccttgagtaaggtgttccaacgagcggttgcgttggtcgcatcggtcgtcttggactgcttgatcaaagcatcgtattcagcatttgaccacttgccatcgttgtaactgttatcggaggtgaacagatccaagaaggaaatagcatctgggaaatcagcactccaagcggagataaccatatcgaactgaccattttgggaacgagatagacgcgtcttgaatggtactgtagcgatggtaactttcagacctggcaggttctgttgcaaggtgctttggaagtattcggcagaacgcttagcattggtcgtatcgtctgtcagcagttccaaagttggtgcggactgaccgacttctttcaaaccttctgtccacaactctttagccttggctggatcgtacttaacagcggaggattcagctttagatgccgtcttggagaagtcttgaccgttcttttcgaacaatccttcaggggtcacattgttggccgcgatggaagcatcattcagaaccttcttaatgtatgcctcgcgatcaatcgacatggaaattgcctgacgaatcttggtgttcttaaagattggatccttcttctcgttcaattcaagatagaaggtcgcactttgcttgaggcctttgaaatcagacatggattttgcttgagccgcttgttcaccttgcaaagctgcgatatcaagtttcttcgactgatacaggttcatcgcggtttgcgaatccttaaccacttgaccattaagggtatcgatgtgaacgttcttagcattccagtaagtagtgttcttagtttctttccaagtgttgccagtgccgttccagttcttcaactggtaaggaccattggacaagatgtacttggaagtagtcccgaatttcttaccagatttttcaacgaatttctcattttgtgggaagaatgctgggttaaccaacatggtcttaaaataaggaatcgcgtggtccaaggtgactttcaaagtcgtcttgttgacggcggtaaccccaagcgtgctggccgcttttttaccggctgtgatgtcatcagcgtttttaacgcctgaatataggtaggcgtattgcgacttggtcttcggttcaaccgtccgccgccaagcaaacacaaaatcttgggctgtgactggatcaccgttactccatttagcattacgtaacttgaaggtataggtcttcccgccatcagtaacagttggttgactcttggccatggcattttccaatttgctgccattgtaccgatacaagccatccatggtatcaatcaatgcctgaccagaaatagcatcggtggtcgttgatggatccatcgtggagatcacatcactctccatccgtgtaatcgaagtacctttactgctgctagaagaattagaaccacaggctgctaacacccctgcaagcgcgagcgcagagcccgcaaccattgtctttctaaatttcatcctgttccctcctaaaatgattgaacttaccttacattagaaatccattaatgtaaataagcgaatcctcaatttcgcctaaaaaaactaattctttgatcttacttttgtcacatttatgctaccgatctcaaattaaaaattgtatatcccgtaaatattctctagatggattccttatttataggcagtaagaagcccagctaagctaataatcgacacgcgtttttgttttcattttgagtgatgatgctaagaatagcttatattaaataacactggcaagaatcgaaaaatcgtcaaatagtggactaatattcggcttttgctcatagaattttcgcttttgtcagacaagctgccatcttatacaaataaagctgagcaaatgctcagctttatttaaccgctttcatatgtttcacttggatttattgaaccgaagccttcgttcgccgactgcgaattgttcgaaaaatgacaattattaatccaaccacggaaacaatggttgctaaccagaaaacaaaggccaatgcatgcaggaatggtgcccccgactgcggcgaaattcgcgtgacgcctggcaactgggcaaaaagtaacgtagcaccaaagctgatgccgatggtcattccgatggttcgcgccaacgagttcagcgatccggccacaccagagacactggcatcaaccgcccccatcgttaaggcattgtttggcgaaaggaacaacgccatgcccgctccattgagcacaatcggccagatgatgggtgccatcgacaattttgctggataaaaggcatagccgacttgtgacacaatcaggactaacaagcccagaatcgtgagatagtaacgattccaatgatcggcaagccagccggcaaacggtgtaatcatcaacatgacaacactttgtagcatcatcaacaggccgcttgcaaaggcagaaatgccgtcgtaactttgcaaatagaatggcaacaaaatgttggaaacggagttaaccaacatgacgatcagcagcacgctgacggatattaaataatcgggattatgcatcaatgctggcgcaatccacggtgacttagcacgttgatcttggatgaaagccaacaacgtcaaaatcgctccaccagcaaggatgagaaatcccaacagatgttgcgtcggctgctgaagccaatagccactggcaaaggtcaagatcatcccgccagtaaacagattttgccctgtccaattggcgttaccccagacttgcttaatctccccagttgctggccggcgcagtggcaaaagtcgcatccccgcaaacacgattagcagaccaactgggacattgaaaaggtaaatccatcgccagcttgcccaagtaatcaaaatgccaccaaatggcgggccggaaatcgacccgacggaaacaaacattgagatcaccgctaacgcctctgctcgattagcatcaggaaagtattggctaacgatgcccatcaaatcgccatgatcatcgccgacccaacggcttgaatgacgcgaccggcaaggatggttagataagtcggcgcgatcccagttaacaatgaaccaacaatgaataccatttcgccgatcaaaaagacgagattttttgagaccaaatcaccgatatggccaaacatgaccagtaaaacagaggtcgtaatgaggccgatggacacaatccaagtcgcggcactgctggaaatcatgagatccgccgaaattttcggcatggccaagttcgtactcgacccagacagagccgttaataacgacatcatccccaaaacaattaaaattttaattcgttgcgcgcgtggcatggtcatcaccatcacaccctttcggactgtattttaggctaattggtcaggagtcacaattattctaccttggtgtgacggggtttgattgagctgatcaaccaactggctgtctgctggcacgcgttgattcaatgaaccggcaagcgatcgcgcaaccggcggcaaaatgacacgtttttggataacaaaaaaccacacagattattcactgtgtggtcagcttgctttggaaattatttttgcgcgcggcctttgtaagttcctgtgtcggtcgtgacgataatagtttcgccatctttgacgaaatcaggcacggtaacaactaagccagtttccaatgttgctggcttgccgccgcccgccacagtgccgcctttgacagccggctgggtttcggtgactttaagttcaacgctgcctggcagttccaagccgataacttcatcgccgtagaattcaatttcaaccggaacgttgggcagcatgaacttcaattcatgctcaatgcttgaagttggcaattcatattgctcgtagctgtcgctgtccatgaagtaggcagtgtcgtcttgcgtatagagataagtcgcctttttacgatccataatcgcaatttcgactttttcgcttggccgcatagtggtggtaacgttagcgccggaacgaatgtcgtagagcttcatttgcatgacggtattgcccttgccaggcttgtggtggttggactccagtaccttgataagcttgccatccttaacaaagaccatcccagatttcaaatcaattgcttcagtcatattttgtgttctccttcattcgcattacgccgcaacggcgcgtttcgtgcttagtataccatagtgaacgatagcgctatctttttaatcaaagacaaaagcacaagctgagccataatttcatctagaccttgtgatctgtcaaatatcgaataaattggaaaaataatctggactaaaaaggggctcgccgtgccaaactccgcaatctccggccagctggggctgatgttttttttcacggctgagccccatctggcctacgattgctccgccttagcactagggtcttcaaatatcagaagggggtgtatcacaaaacgcttgtttggtagacataatgccaaattaaaaagcccgtttcttctccatcgagtcaccacaacagaatagagaaaaacggacttccgaaacactcgacatgatattgacaactcaccaagaacaactgctcactaataagctagacctgagaaacttcggcaatcacttgtcaaagtcagatcacagattcctgaaacatctcattttgtcatcacattgacagaagatgtacctatcttggctccaatcctacgacagaatgcagagagctggcggagcggggatggggctcagccgtgaaattggtcttggtggcgtggttttctccgcctagaccaaggccgatcttcaagaccgcggttttggcgggcttgaagttgtgcccacagctctagcttcgcggtcgccatcccgcatccccgcgtagccagctcggatcatcaattaaagcttaagcccagaatagaactgaagaactaaggaactaaaaatctcaaactacatatcctccacaaccaagtaagtcatgtccaacgggccgtggacgccgacaacgagggtcatttcgatgtcgccagagttggatggaccggtgatgaagttgatgttgctggtttggagcttgccggctttaatgtcagcatcatagtgatccatagcttggcgagaacgtggcaggatgttgctctttttgacaatagccaagtaatgggttggcaggaagtggaagccacggccttggccaggggtggtggcaacggtaatcgtgcctgattcagccagcaaataatccgcaaagccgatggcgacgtccgcggccgccgcttgcttcaaattgaagtcgcggcctttgcctggcgtccagtacatcggcttaggactgacggtgttggtccattcggtcaagccaaaatccgcgtacttgtcagtggttggcaaaatcattgttttaggcgcatcttgctcaatgtaagcatccaaggcagccgccaaatcagctttcgtggtggttttaaacgtgacatgcaccccttcgctatttttcttagcgatggtttctagctcatcttgagagtggccagacaaggttgtttctggcagatcattgagcggctcaaatggatgatctttgaactggtgccgcggtcggccggctttttcagcgatggcgttcaaaaaatcttcccgattcgtgtgatcactcatgtttttgcgcctccaatgctgccttgtgctccttgaaccagtgacggaagttctcgttcttcttcggtggccgtggcaggtcacgcacatcggtccagccgcgtgcgagtttcggcagcatcttagtttgtttgatgcgaccactattgtactcattttccacgctaccttgatccttcgtagccaaaacgcccatcatggcatggtccatatcaagtgccatattgaataaaaccggagcgctggtgccaacgccaaccattttcatgatcttgtcgttgaagctgtggtccatcttgagcttatccatcatgacttcacgatgcttgatcaacaattcgtgaagcggaatgcggacgggacaggtttcggtacatgcagcgcagagacttgaagcaaatggcaaatcgccgaacttttcataaccgtctaaaactggtgaaagcaccgcgccgattggccctgggtagattgaaccgtaaccatgaccaccgatatgccgataaaccgggcagacattgagacacgcgccacagcgaatgcattgcaagactggctcgaatggcgtgccaagggcgttactgcggccattatcgacaatgaccacatgaaaatcttctggtccgtctgcttcgccgtcaacttgcttgccagagaaggaacaatagctggtcagtttctgacccaccgctgaccgagacaacatgttatccagtgtttctgcttccttcaaacttgggacaatccgttccatccccatcacgaccacctgtgtcttaggaatcgccatggtcagatccgcattgccttcattagtgaccaaattgatcaacccggagtcggcaatcgcaaaattgcaccccgtaataccgaaatcagcttgtaagaaatagcgccgcaagtattcacgcgcgaacctggctaaatgttctggatcgttgtcaccttcgtaacccagcttatcgaaaatggttttgacctgatcgcggtttttcgccaatgccgggaaaacgatgtgggttggttctgcccaatcgtcttcttgcaaaataaactcagccaaatcagtttccatcagctgggtgccaggaatcttcaacaaatctttgtccaaattgatttcggtggtgaccatcgacttggacttcacaatcttcttggcctgcttcttcttggcaaggttcgtgatgtaagccgcggcttctttgtccgttttggcaaagtaaacgtgcccgccgcgtttttcaacgttatcgctaaattcttctaaataatccggtaagtatttgatcacatgctggcggatctgctcgccaagatcgcgccattgcggccagttgccaagttcgtgacgtgacgcctcgcgtttatcccactgggcgtcttgtgctttggcaacactcgcctgcatgaacttatcctgttcagattctttcacccgctccaagaatggtttatcactggtaacgatactcataggcgcacctcctgttctaccggcagtggatcatggaacttgattcgtttcgggtcaacattgtggttgagcacttcagcaatgtgcatgatcttaattttttcctgacggcgagagaagcgaccggaaatattcatcaagcaggctggatcagccgaaatcaggactttggccccagtactcagcacatcgtcgactttttcatccaccatctgcttggaaatctccggctctttagcggaaaacatgccgccgaagccgcagcagttttcgatatgtgggagtggttccatttgcagatccttcacatgatcaagcaaaacgaatggtgctgtccgctcacccaacaaccgggtcatgtggcaagagcgatgataggtagctttggcatcgagttcagcgcctgcatcaatcacattcaaaacccgatacagaaactgggagaattcaaatgttttgtcggcgacttccttcgccttttcagcgtattccggatcatctttaagtaaaacgcggtattcgcgcagcatatttacgcaagaaccagctggcccgacgatgtagtcggcatcaactgacagcaacgcatcgatctcattacgaaagaccttctgcgtagctttcacgtaacctgaattatatgtcggctggccgcaacaaatctgcttaaccggcatgaaggtttcacagccaaagcgttccaatacttcgaccattgctgccccaacgttcgggaagaaaagatctacgatacaggtggagaaaatgacaactttcatggcgcacctcctatattaaaacgattccaatttaaatatacacctccaaacatgattacggtactgaaagcgtttataaaaaaataatttacttctttttgaaatcgttatactaactagcagcgaccagccaatgagttcactttgaaaaagcactgtttatgctagcttttgatactaggtttaagcatattgtttcttaagcacgatgctgcccgtctgaatcacgctgacaacttggcataactgccactatcatccacaattaggctgtcaccaaaaccaacgacatcttgtggctcttttgctgctttattaactaaaaaaaatcaactttttaaaacggtctataccccctctcccccttgacttgacgctgtttcgcacggtttcacagccttgatttttaggctaaaaagactatggtaaaggtggagttaggaaaccctaaataataatggaggcgtgtttatgcgtaagcgatatagggcaacgttacaggcgcttaatgatgattgtatcggtcggaaagcacacgggtttgcgaatcttgaagtcacggatgatgatgccctgcaaattcgcatcgagatgtttaatacgccagcagatatgacgcatatggccgttttggaaggttccgttacgaaagcgccagtcgcggttgcgacagccgcgcaagacgtgaaccatgatggtgtcgttgacgaggaagaagcagagaaggtttccggtaaagtgtttgtgccactcgataatgctcctgaaaagctgaatctcatcggtggtaaatatccagaagccgacgacaatggcttttacatttaccagcagcgagttgtcatgtcagacttgcgggaacagttgctcaaacgttacggcacggatgtcttcaatcttgataatgcggtcatgtatgttgacggcgtccaaagcgatgtcctgttgccgaaaacagtgatgagcgatttggacaaagagaaaccttatctcaccttgccgattgccgttggtaagttgcgtaaggtgatgggttgatcattgtccgccaatatgggattcgtgaaaaggttgggctaaacaattctctgtcgtgccaagctctatagttgtagactttgatctttcaagcctaaaaggcactgtgacgtgggcaaaaattctttgtttcggtaattgcaaattttgtcctgacctgttcactgtttcttgttagctttacaccattcaaaaaagccgatcatcatctgaccggcttttcgtttgtcatttttgtgttgcgcccatgattaaacagttggcgccgttgtcatttctgccatccgctgataaacagcaacaacttcacccgccaaatcgcgaaaagtgatggcattcatgaggtgatcctgcgcgtgaaccattagcaatgacacctcagcatgatcgccgcttgcttcagcagtcagcagctctgtttgcgcattatgcgctgacactaaagcatcatcagcttcttttaattgcacagttgcttcaggaaagtcaccggctttggcggcttgaatcgcggtgaaggccgcacttttggcattgccgcctgctataatcaagcccatgatcgtttgttcattcacttgcgtcatcgcgttttctcctttgtcatgatcagtgtttgttaactcatcggcggtttgtggctctaacttttaacatgctttaacatgaacgtccgccatggtttcagcaacggcaacaagtcgagatctgagtcggttaattgaccaattttattgcgtcggccatcatttgccagttcacgcaggacaatttgcagttctccggcatagcgggcatacgtctcattcaccacgacaacatcgccacggtgtaacgtgccagttgcgtcatgcgccggaatcgcctgtcctgcatagcgaacgcgtggttgggtgtcgcgaaccagataatctgaggcgtcaccacgatataaatgcgcctcactgaatgcaatcttcgtttccaattcagaaatggccgccgttggatgcacgcgcaatgcaggatacggacagaagaaggccagtgccgcggcgtgcaaatcagcctcgctcgccatcgcattgccgattaacacatcgtcaatcacctcggtcaatcgcaaatggtgcacctgactggcaatggcccgatcgcgatcactttccagtgtcggcaagccttcgctgatcggccacggcccatgatcagcacttggcgcagtcacaaatgccgcggtgcgaatgccataatgtcgaaacttctgcgagtaggccacaaaccgctcatcacccaaaccagtatattgctgcgggtaaaaattatggcagcctaacaagttatctagacgtggtccaaacggcatgatggcatcaacataattcgtgccagcactcatattgatctcaattttcaagccatactggttatgcgtcatcaacgcctcttcttgtccagtaaatccctcgtcaagccgcaagccccagacgcccagttcgtgaaagaaactcagatcatgataatcaatttctaactcggaaaataacggtggtgcaatatcgacaatcgttttaaatccaagttgagttgctttggcaacaacagccttaaaaatggccaactgatcgcggcctttttcaccggacaactgcaatagcgatgtaaacagccgccgatacccaagctgatgagccatttctagataagcagtcgccttcgctaccgtggtttgttctgggtagagactgatcccaatctgtcccattttttcgcctccttctgtcgagtcattgttttttgtttcactgtcttgtattgcttgctttgtgctccgtgccgatacacatggtgtgtcacctctaaaggcaacttttttaagattgacacatcttcaaggccattttcttgaatcggcgtttccgaaaccagcccatcagtaggccgctcacccgattgttggccgtgcctcgcgccgtttttgcgactaaggactcttcatattccaaccgactttttcccgatgcaagtggcactaggcgatagctaacgcgaaagtcgtcttgcggcgttgccaatgtataagcatagactttgttcggctccatgtcggtaatctccagccgcgcctgccgaccattcggccattttttagcatagctaaacccgcgcaaacttcccggtaaaggttcctggccggtatgcgtgcgaatgtctgccaatgccgagagctgtaactgtttgaaaaagaccgccggctcaaccggcagattcatggtgatcttcatcgcgcccctcctgcttttgtgccttgatcaactgaacatagcgacggacgaacacaatcgttaaaccaatgccgatgccgcagccaacgatctgccatggtgctggcaataatggactgaacatcacgatggccatactgagattgagcaagatcaagtttgctgtcacatttttcaaacagcatcaccttccagcttgcctgtctccttcacgcgtttttcttttttcatcaccggttcgtcaacggtcaactcagggtccaacttgttggctgctttgacgaatggcacatagatcaagaacccgatgaccatattgactgcctgtagaatcggtgcacgccagtccatggttgcaatcagcgagttgacaaacggtggcattgaccagacgatttgattcttaactggcgatacccagccgaggatgtgggcgccataagcgattgagaccatgaccactggcgccaaaatgaatgggatgaagtaaatcggatccagcacgatcggcaacccgaacatcacaggttcattcacattgaagcagcctggggcaattgataattttgccacggtacgttgatcgtctcgttttgaaaacaggaggatggcaatcagcagcagcaaggtactgccggcgccgccaatccatgcatacagatcaaatgcgtttcgggtccagacaaacggtaacgcttcacctttcatgaacgcattcatgttagcaatttgggcggtcaaccaaatggaatccaacaccggtccaagcacattggtcccgtgcagaccgaagaaccagaagatttgcaccaacagtgtcatcagtaagactgcccagaaaccttgcgacatattcagcaatggttcctgaattaaggtagcaataaattcgatcaccgttgttttgtttaagctaatcagatagttgatcacaccggctaaatacaacgcagccgttgctgggatgatcccggtaaacgccttcgcaatagcaggcggcaccgcctctggcatcttaatcgtgacattctttttcatgagccagatgtataaggtcatggcgatgccgcccatgatcatgacggtgaagaagccataggaaccaaagaacttgccaaagttgaagtagccccacatgctgatgttcttgccatcaacaaccccaccagcatcggtaatcaactttgtagcgcctttaccaagtgcactgcttaaagcgactgtgaaattctgcggtaaactcatgatgaatgcgcctagtaccacaatccccccagtcaccggctcaacttggtactggactgctaattgatagccgaacgtgaaggcaaacagcaagcctagaatcgccagtgtgccggtccaaaccatcgcattaatgccgatcagccattgcattgaatcaacaatgcccatccacttgaactgggtcggaatatcgcgaattaaaacgttcaagactgtcgaaactgcaccagccatcatcgctggcataatcgcaataaacgcgtcacgtaaagcaactaaccaccgaattgatccaatcttagccgcgatcggcaccacatgccgattcagccatccaataaatgcattcataaagatgcactcccctcaaatatttttttgataatgtcgcagtcattctttattacaattaaaattttacgggagtgctggttcgcgggtcaaagataatagtagttattgtttataatttttataagcaaaataggatgatgatttgttcttgtgttggctggttgaacaccggtagtacgagttggctccgcgccgattgggctggaacgtggtgggcacagctttgaactcgcgcaaacccggcgcgatttcaaagtctggccttgttctaaaacgggaaaaccacccgtttaagaacaatttcaccactgagcccatcgtcgctccgccaactctttctttctgctgttgggaatatcagcttgatgcatcattttcaatcgacaaataaagattgttggttctgacttctcatggcgtatttattgcaatttttaaagaccgtagtgccaaggcggagcaatcgtaggccagatggggctcagccgtgcaaacaacacagcgaccgggctttgagctgatgttgttaggcgactttgagaccgcgcactttgcgggctcaaagcgccgtcacagcgttccagccccagctggccggagattgcggagtttggcacggcaagaaaattttagcctagcagttccctacgattattcggaatttaataaaccacaagtcctacaagagaatgatggctctcactcgtgatttctagcaattcaagtttcagaaatgaaaacatcccccgatatcgcaagcagttcgacaaccattcgcttataatagattgaaaccagtcaccataacgcgctcgcagtcgcagaaacctgctcgcgctttccatcatgggggtaaactttatggcaaatattgaatatgatccggaacgtcaattgtttcatttgcacaacgacacctttagctatgtcattcaggttattcgcggttatcttgttaaacgttactgcggaccggcgctggatcatttttctggtaccgccaaacttgaagacttcagccatgcttttaacattcaaaatgatgccgcaccttactcactgacgaccttgccgctggaatatagcacattgatgggcggcgattaccgtacgccagcttacgccgtgcgtaacggtcacggtcagctgattggtaatctcaagtttgaccactatcaaatccttgctggcaatgaaagctttaacggtaccttgccgacagcgcggacaccgcacgggcaaacgctgatcataacgatgcacgatgaaacccagacgcttgctgtccgtctcaaatacacgattgtcggcgatttgcctgtcttgctcaaacaagttgagtatcgtaatctgacagacacgacactgacgattactcatgctgccagccttcaactagattttgacgaccacgcttatgacctcattacgctgaccggcgctcatctcaatgaggccaaagtgacccgccagccgctgacccccggcaaaaagtcaatcggcagtaattatggcgccagtgggccgcaaggtgtcccggcgacgattcttgcagcgccagcgaccaatgaatttgctggggaagctttaggcgtcacgcttttgtggagcggcaattttaactatacagcgcaagtcgatcagttcgacaacagccggctcgtgatgggactgaatccggagctctttgcatggcaactcaagcccggcaagccatttgtcacgccggaagcagccgtcgcttacaccaacgatggcctaaatgatctcagccggatcttccaccgcttttttgccgatcatgtcatgccattgccgcgcaaaaacctaattgaatacaacacgtgggaaaccacttattttgacgttagcgaagccaaaattcttgccgagattcccaaagcggaagagttaggagttgagttactggtcattgatgatggctggttcaaaaatcggcctaacgatgctggccaacttggcgactgggtacctgatcccgttaaatttccacatggtttgcgcccggtggctgacgcaattcacgctcgcggccttgcttttggactttgggtcgaacccgaaatgatcagcgaaaatagtgagctctatgccacccaccctgactgggccatgcaatatgtcggccaaaaacctctgcgttcccgcaatcagcttattctcgatctcagtcagcggattgtgcaggatcacttgatcacagttctaactaacctcgtgcgcgataatcacattgactacctcaagtgggactataaccgccacttcagtcaacctggcagtccggtactgccacctgatcaacaaggtgaagtcggttatcgctatacccgcggcttatatcgggttttgaaaacgttacgcgacacttttccaaagctactcatcgaaaattgttcgtccggcggtggtcgtttagatggcgggatgatcgcctacaccgaccaaacatggaccagcgattttactgacccggtttaccgcatgaaaattatgaacggcttctcgctgtttttcccgctcaaaatttttgtctcgcatttcaccgcctccccgaatctacaagatgcgcggttaacgcccttgcatacccgcgcactgttaagtctggttggcatcactggcatcgaatgcccgccgagtcagcttagtcccgctgaagccgcggcggtcaaggccagttttgccttttacaaagcgaatcgcaaagaattgcagaatggtttgctttttcggttacgacctagccatgttaatcaagacgaggtttgttggctgatcaccaacgccgccaaaaccaaggcactggtcttgacttcagtcggtgtcacttcgccgattccccattatcaacatgtactgctgcattacttggacccaagattgtcttatcaaatcgacaacaccaaaaatgccaccgggttagaactgaaccacgccggtgttaccttgccacttgcccatggtgatttttcggcaacgctcatggagttaacggcagtaaccaaccttccgcaacccaccgcagcaccgacgcttgatcaaataaccacgcaaagttagaccatcttgttgttcaagcatgaccgtttaatctcagccgttagaaagtgagtttcgctcgcatgaaatttatcatcgctcccgctaagaaaatgatccgcgctcaagacgattttccggtccaaagccagcccaaataccgtgcccaagctggcgagctgttgctgctgatgcaacaattgaccttttctgaagcgcaggcgctgtggcataccagtgacaaactcacgcaaaccgcctacaaccaactgcagcaatgtgacctgactcgccgacagtcaccggccatcttcagctattctggcattcaataccaatacatggctccggactttctagacgacgccggactggtgtacattcagcaacatcttcggattttgtcaggactgtatggcattttgcgcccattcgatggcgttgtgccttatcgcttagaaatgcaaaatcacttacctctgcctcatcatcgcaatctatatgatttttggggcaaccgcctttatcaggccttagccagaatgcccggccccatcatcaacctcgcctctgacgaatatgccaaagccattcgcccctacttgcaagcaaaagatcaattcatagatgtccgtttcgcccatcgcgttaacggtcaactaaaaacccgtgccacttatgccaaaatggcccgtggtgaaatgattcgttttgccgccagccatcggttaactaaggcggctgatttgaaaaattttgattccccgacttatcgcttcgatgctcacctttcaaccgcaacacaactggtgttcatcgcgaagtgagtctttataaaaagctggcccaaattgcctttgatgagtatcaccatgaccggcccagtctcctttggccggtaatgatgtgaagaatcagccatcattgacagtttgagtcagtttttttgcgtacgcggcctcgcgctcaagccccaccattaaactcatcgcatgtgtcaaaaaacgcttctgtgcaggtaaaaactcatcagcgagctcaaaacttgcagtttcgcaaaatccaagttaatatataaacaaatgctagaaaagtttgtttatatggaaacttcaaataattttgtttgcgaaaattcagagctaacgcacggttatcggctcaaaaatcatcattaccaatgccgctactgtccggtcacatttgcggcggatgaagtctatccgcaagatggccattttttcacagctgaagccatgatccggcagcatgtcgctcaagtccatcatggcgcgcttgcagcgttagtggcacagcccgctggtcaacttggggtgtcatccagtcaacagacagttttacagttgttcgcacagggactcagtgatactgtcatcgcgcaacgtctcaaagtctcgccttccaccatccgcaactaccgctttaagttccgtgaaaaggcgcaacaggcacaacaatttctcgccgccatgacgctgctagcgatgccagacgcgctgatcatccctcacgacggtgcaaaaatgatcgatgatcgatatgcgatcacgcctgaggaacgaaccaagacactcaaaagtttcatggacgctgatggtcgcgtgacgaattggccatcaaaagagaaacgcaagctcattattttatcggaaattttcaaaggcttcgatccccagaagaactactcggaaaccgcggtcaatgaaattcttaagcaacacgttgaggattatgtcacggtccggcgtaatttgattgaatacggctttctcgatcgaaccgcagatggccgcacgtattgggtcaaggctagtggtccgcgaatttaagatagcacgataaatgtgttcgcgggctattcaaaaaagaatttagaataaagattctgcgccgtgccaaactccgcaatctccggccagacggggaggcgacgcgtagctaaagcggagccggggcttcgagcgcaaaaaccggtctcgaagtcgccttacaacatcagcgacaaggcccggtcgctgtgttgtttgcaccgctgagcccgatctggcctacgattgctccgccttggcactgaggtttttaaaaagttatcgtgataagccgaaaagcgagggattttccgaattctcagaaaatccctcgcctttatttgtcttccatgaatgatatgactatcaaacatcccgagcaggttttctagccggcaattgagcaacctcatcgacaatctgatccaagatgtccagttgttccgcataacgaacggcaaatggctgctcgcttggtttgacttcctctgcttccagcgcgggtcgcgtggataagcgttcagcgtgccgcttatccagccaagccaagacctgatcaaaggtatagcggctgaacgtatcgactgtcaattggccggatagaaaactgccgagcaaatcatggcgggcgtcgatgggatagattttggtgcgggctaagagtacccgaaagtcaccaaaaaagatgaattgctgctgggtgcgcgtcaacgccgtataaaagctttgggcattgagcatcatgtcggcgccgttgacaatggcaataacggtatctgcctgcccaccttgggccttatgcaccgtaatcgcataagccagcgtcaaatcgcgcggcacgctgccaaaactgtagtaacaatattgctggccgatttggaccacaacaaaatggcgtttggtatcaatatgggctaccacccctgtgtcgccgtttgccacaattgtctcacgccaacgtttagtgccaaaatcatcggtctgttgcaagccattttcgcccagaaccgcacgccgttcccatgttttcggatcaacaagcgggacatgtttgtcgtttttcaaaatcatgacccgatcattgaggcgcaagtgatgtttttgattagtgaccggatccacgtaactgctgatatactccggttcgccatttttagccgggttaaccaacgcttgcaactcagcattaaatcgcaagcggccagttgcgccgatgtttttattcacgatcaacaattgcgcatcaatctgctgaccacttttgaccagcgcatcctgatacgccttcaccccagcgtcaaacacccggcctgcattgcgttggttatagagcgccacgttgctgctgacatagcgatcatcgtctggtccaaaaggcagcgctaaccgctcacgaatgcgattagctagtgctaacacgccggactggctatcttgccgataaacgcgcgtcagtgttgtcgccgccacctgttcatcgtctagacaatcttttaaaaagttgccaggaccgatgggcggcagttggaaaacatcaccgacaaacagcacatgcgcctttttgaaattaacgttcttcaaaaccgtgtaggctagcggcgttgtcagcattgagctttcatccaccacaatgagtcgcgcatcgccaaaggtttcccagtcggcatccgcgtcaaactggccggtttcttcacctggcagtagatgcagataagcatgaatcgtggcagccggctcgtgcgtatactttgccaaaactttggcggcgcggccagttggtgcaagcaagacactctcaccctttgcttgggcgttaaaaaaccgaaccagcaaatcggtcaaccaagttttaccggtgccagcactgccgtttaaaacactcaagccatgacggttcacattttgaaaagcggcgcgctgttgatcattaatggttaaatgaaaccgatcgagaaactgatcgagcgcatcatctagctcatccggagccatcaacggttcggctgttttttgagcgactttaataatccgcgccaccgatccttctgtggcaaacatatcgcaactcgtcaccagtccatactgctcgttaagtaaaaagccgtattgcaaggcttcttgcggatcagcaaacattttcaaatcggcttcgcgtacagccaataaagtagcagcttgctgccggaaccacgtaatggtgatataggtcaatccttgcgtgagtacagcggtgcgaaaaatatattgcaatcctgccgtaagccgatgcggatcattcgctgcaatgccacgcgttttagcaaaggtgtcgactttcttgaaatcaagctgggtaactgacatcaacaggtacggattggcatcaatactttgcatggccaaattggcatctttataagccaaccaaattttttcataagtcattgagcttagtgccttgccccagtgattggccaacacggcaatttccagtttgccgcggatggcggtagcgattttcttaattgtggcgggaccaatgcccgggacactatccggttttacctgatcggttgaaaaaatcgtcaagatcggggtgtcatctgcaaaatgttcatgcaatcggcgccggactgtcggctgatgcactagcagcgtgtcaatcagctgccactgccggcgcggttctttgggcaagccaaaatgcaaccgcgccaatttgtaagacggcttgttataacgcaatgagccagcatcatcgtaaaccaaatcagcggtgatgatcgctcggcgattgtagtagcccatatcaccggtaatggttgcctcttgggtgagcgtcattttaagcgccggattcggattcagaatccgcacggcgtaaactttataatcaccgttatcgctattaaacagcaacttgatcacttgcagatcaacattttcataaacttgttcctgattagccatgtgcgcccctcctctcaaaaaacaatcaccgacaaaaactttatagttgcattcttagtttcgttgtctcgtgtgtcgcagccttgtccaacttcggtgcaatccgaaagcgaaaatcctccggtaaggcttgcaactcatgctgagcccactgttggataaaggtcggttgctgccggatctgataaaactgcaattctgggcgatgcgtactgtaaactacgacatcttctcgcccgtgcttcactgaccactgaatggccgccagcagtgcgaccaagccggcagatggtagataaaattttcgcgccgggttgaaatcgtccggtgtcagctcagcatttgctggcgcatcagcgtatgccaactctttgactgcatcgtccaaaaactgggtgtggcgcaacaatgttttatctgccgcatccgtgattttcaagccaaatcgattgccattcagatcattcagccatgctaaataaacctttgtctgcggcgcaaaatctgcactatcaacctcgtgctgcagattggccatgccgcgatgcagcaagatcccctcagctgtgccgccattaggaagtttaatgatgcgttgtgcctcgcttgatgttgcgtgtgtatctgccatgatcggcctcttttcttcaaataagcttaaccggtatggtggttggctgcaaatattgattagctaaccctcaaaaaggtggctgacttgctgctaacattgacttttgagtgatctcgagcgtcccattagcatcgacttttactactatcattcttttgatatttttggggttgaagcttagaccggcaatttaagtctcacaaatcggcatttatttaccttaaaacgagacaaagagttatttttagctttgtgatctcgtgaatttgaaggcgggtttccatgtaaagcctattaataagcgattaaacaaattttgcttgctcactcaattcgtttttgttggctctcgcaaccattcgcgtacaattaaagttgttccagcgaatgggacgatttgacatcaattgggggggaacttttatgtcaaagaaattgtggttgagcggtgtcgcgtttgccggtctcgttgtggggagtattgcaaccggttcatcgcttgtagctgcggacaataccgttggcacgacaaatacgacagtcgcagtgacgggtggcacaatcgaccttgcagtgcctgacacactgacttttccaagtgagcctgtcgaagggattgttagaggcaatgtcaacgagacggttaatcccgctgacaactcattattaacgatcaatgacttccgcggtacggacgccgggtatacggtgtcggccaaagcgtctgcgatcacagccgctaatggcgatgttctgccaggcgcggccatcgaactaacgccggatgccccagcagtgacgaatactgatgccccgacttggagtaaagcggtaacgttgacggattcagatcaaccattattcgccacgaccaaatcgctaaacggtgccggcattagcagttatgatctgaacaaaacaacgttggcaattcctgaggacaacgctgttaaggctgaaagctattccggtgtcatcacctttacattgacaccgggtcaaccagccgcaccagctactgcacagtaacggtggcgcgaggttgatggttttcgacttttctggttgtacttgccggaagggagttggttcatgtcaggacatcaccacaagattgttcggtcgccaccaaaaagcagcgcagtatccgtggcgcttggatcggcaatcattcatgcaccatatcgtattgaatccacaagtctttcatctctcttatgaattttcatctctacacatgcggcatcaccattgtcttgggggagacggtgatgccgcatgaaaaagaaccaaagttaatgtcttgctcaaggttgacttgcaactgtcagctttgataaccaagtcgcgacacggcaaccagcaacatcagagcgcaaacagaagcgctaaaaaatcggaacatgttcaaatcccaatttgatgttaccggcattgctgatcgttcacgcgcacggtcagcgatccaaacccacagtaccgatcttttcaaagttcccgaaatgggttgccgacttggtctatcaaaaagcatcaaagaaaccgtcgattttatgatcgacggttttttcgtgagcgcgaaccagcccgggtagaaaccggagcatatgcggccttgggcgtgatggtcggtttttgaccattgcgatcaaggtccttatgggcaggtttctgggctggcaagcgcgttatgacgaagcgtgaaccagcccggatagaaaccggagcataagcggccttggcgtgatggttggtttttgaccattgcgaccacggcccttatgcgcaggtttctgggatggcaagcgcgttatgacgaaacacagcgcaaattttcacgaaagcagtggtgcgccatgcccaaatgaaccgggcaacaaaacctgcgccgaagcgaacttagccgcatgacttaatgattccgaaactttggcatccaaggttggcttgctagaagaatacaaggtcgcagcaaaggacgtaatataagcatcccctgctcccaacgaatccaccgccttcacgccaagcgcctgctgccaagacatcatgccgtcaaccagcgccgccgaaccacgcaatccgcgtgaacaaacaatccgatcacaaccagctgccgcaacccggcgcatcaatgcctccacatcatcatcagaccgtgctttgccagaaagataggcgagatcaatctgtggcgcaatctttttaaacagtttgtcatcgtcaaggatcgaaaagtcataaaccttgcgcgctgtgatagcctgcagaaaagcatccgcatgactttcactattcagatagaccagatcgaaactattgatataggcaatgtcctctgggtcaagtcgcagctcttgtggcggctcgccgaccactttacgccgtgccccgtctttgcctgcgatcgttgtaaaagcatttcgaccggcatattgtagcgaatgctgcacatctacgccgcgttcgaccaacatgcgccgcgcaaaatcgccacgcgcatcattcccgaacgtcccgatataggctgcctgcaagccgagttcggcggcaaaaaccgccgtattcgctgcatgaccaccaagatacatctgcttatcagccggataaaggtcaacgacattgtctccaatcgcaatgactttcaacgatctctccttctttccatcaaacgcagcaactgcagtcttcgatcaaactgccgtcatgcacacccctgcttcctgttaacaaggtcaagtttaccacagcaggaattgggtgtggcatcaagcttgtcatgttttccagaatgcatgatcatcaccaagcctatcagcgttaggaaatgaacaaaacggcgtccaaaactggccgtcgttttttcgttttatatgttattccaagctaatgtctgaaaacttattacggtcaccaataacagtctacaaatttcgatgatgggtattatcatcatcaggtttgctttttcatttcgccaaatttccaaccaccttaatcttcacccgattcgcattctcaggatgataagccagcggtacctcatcaacttcaacgacttcaatcgtcgtttcatccgcgccagattcaattgctgcggcagtagctttctccttggcatcagccatcgccttgtcgcgcggaatctggttgtatggataaattcggccgtattcacccgaaacctgactgatggacgcaccaatcgcgtttgccacaccgcccaatgggtcacgaactagtttgccgaccccttccagccgatgcggtgcgatgatcgccccgccaccaacaaggatcactgttgccggctcagcactcgtcttcattttatcaatcgccacggcgatcatgtcgctgatcgtttgcaaagccgcctgagcgaacttcagcgaaatttgcttggtcagttggggatcgccgacatccgacaaacccaaacgaaccgcaatgtcagtggcggtgatgatgttaccgccaaacgtcagcgcctcgtcggtaattttgtagccaacggaatcggggcccaccgtgacactgccatcttgctgctggcgaacgatcgaaccaccgcctaagccaatcgacatgatgtccggcatctggaagttagtcgccacgccgccacaatcagagtttacatgcgtttttcagcccaatatttgccgaatcgccagtaacaccaaacccaatcccatcatcgccatcgtaacgttaagcaccttcgtcacgattcgccgctcttggtcatccatctcctctatcatgctcaaactatagtcattgtaaggaccagcatcccagtacccgacataataactcagcaacttcttctcactaccagtcaacggcttactgtcagcccgaagcaacaggtgatcatcaaacaaggcatacatgtcatcgctcaacatagccgccttacgatgccgcctcgcctgctcactgacctgatcgaacaaccgctgaaaccgtttccgcgccagcgcatcttcatcatcctccgctgaccacgccgtcaatttccgcttaaaaatcgccatcaccgcgttaaagtgcttccgttgaaaatgatttgcaaacgtcagataacgattctgttcattcagatatttattttgccaagtctgataaagaaagtagccaaacaaccacaacacgatcaaagcattgatcaagttccccaagttccaagccgtcatcagtttctcaagactaccaatcacccaaaaagtcaggatcatgagactaacaaacaacgacaacagctgtttctgccgcatctgcggattccgctgcatctcggcataaatcgtctggcgatgtttcaggtaaaggacaaagtagtccaaaaagttcaatgagcggacttgtcggtaggttttaacaatgtaaaagagcaggatgaccagtgaaatcatgttgatgacgcggttgatggtgtcgattggggacattgaggactccttttcaatttaatttcaatgttgtagtgccatcatctttaaacccagttgctctttatagtcccaatacggacctccggcgaatccaatttataaccaactgtcagctaactgacggtgctgtgtctaactgctaacaaacgacaagcaatctcttcaattctgcgtttattaacttcctagctcacacccaaggccttaaaagccgcatctttaaccgaattataaaagatcaagttaaatgaactcatcagatctgttggcacaccgctgatgtcgctggccgctgcagctggcagcaagacacgttttgctccactgtccaaggcgacttgcaatgtatcggcaagatcatcgatgcgtgaaatcgttccgccaatcgtgaaatcacccaagataactaaacgatctagtgtcggtttccctaatgcgatcgaaactagcgcgataaatgtcgccaaagaaatatggctagatggaactgaattattcaaattagtcgcgctaaccacgaaatcacgggcgttggcattaattcgttgatcaattcctttatagttggcctcaagatacttaaaggctgtgtccattgcctctttagcttttgtacttgatccgacgcccgatttactcagtctaccaagtcctggaacgacctgtgtttctaatttgatcagactaagccgtttactctcgtcataagcaacagtataaacatggccgggattttcttgaccatcaggaatgagcgaacttgatccagtttccggaaccgagacataagtttcctcaaaggtcgtcttatcaatataagaaaagttgacatcatagaattccatgcccccgattcgtttgagttgttcttttactcgacgacgcatttccatagcaaattcaagaattttcgcaacgtctgctttgtcaaacacaccgtctggataaagtaatttgataagtcctgagacagtcttacgaaccgcaatcacgtcacgctggttaagctgctttccaaacgaaaaatactcgtcaatcgcatctgcgtaagaaatcttgcggagctcgcgcattacctctgcaaaataatcagtgataaagccaaaccccttggtaaagaactcaggccgatacttagggatctcccaaccaggtaagtagttatgaattctatccaagaaagccgtatcattgcccatcatctcaggaaagggttcaaagagattagaagttctcaaaaggacatcaacactctgattgatattcccgacaaacaccatgcctgctgaagcttgaatctcatttcgcccacgtgcaaatgatcccgaagccatataatccttcataatctgcacgccatctttatctttgaaatgaatcccagccacttcgtcgaatgccacgacgtcccacatgccgacaagtcccacttcacgtctagacatgttatagaacaagttggcgacagtcgtctggccacctgaaatcagaattgaatctggcgaaagctctttataaacatgtgatttgcccgtgccacgaggacccagttcgacaaaattgtaattattctcaacgaaagggattaatcgagaaagtaacagccacttttcgcgctcagtaaattgagttggctccatccctgttgtccgcaataaaacatccagccattcttcagtggtgaaggcctttcttccggcgtagacttcttgcatatcaacaaatggtacttgaataggattcagcttttgaattgagaaatggtcaaggctttcgtgatcgtaactaacgcgcacaattgaccaaatacctccaatcaacaaacgctcataatcttgcacataatgctcgtcaaccggcacgcccgttaagccaagattgctgaagctcgcttcataccgatcttcaccttcattcaaacgaactgaaagcttgtcgatgactgtataagcaccatcttctcgaatcttagattttactttttcccccagtttacaattcaagtgcaacaccctgacgactagaccataaaggccatgaagacctattcttgttagtgctagctaaacaagaaagcaggaatcttcatgacccactctcagactaacacccacaagcattaccaacaactcagttttagcgaccgtgctacaattcaggcccttcaggctgctggtgacaccgcgaccgtgattgcacagaagcttcatcgcagtaaagcgacaatctcacgagaaatcacgcgtggatctgtaactcagctcgactcgaagcgtcactcgcatcaagtctatcttgcggaaactgcccaagccatgcacgaccgtaaacgcgatagaaccggtcactacgcctttcttaagaccggccgtgcgttcttcaaggctctcgccagggagcttactcgtaagccgcgcgtacacagcgttgatagcttcgtacacttctatcgcgaccagggcaaggcttgcccttcaacgacaactgtgtatcgctacatcgacgccgggctgcttgagctagacaacatgacacttcccaagaagctccgacgccgcatcaaaggctataagaacgcccacaagcgcaagaataagaagatatacggcgactcaatcgagttgcgtcctgcggccgtgaatgaccgcacaggcgtgggacattgggaaggcgacttggtcaaaggtattcgcttagctgatgagccagcattaatgacgctcacagaacggtacagccggactgagatcatcgtcaagattcctgactatcatgcgggcacctgccttaaagccttgcaggacacgatcgacgactacggggccaaggaatttgagagtatcacttttgacaatggttccgagtttgccaagttatcagagattgttggaacccagatttacttcgcacatccgtactcgccttgggagcgtggcacaaacgagaacgccaatggactgcttagggaattcttcccgaaagggaagtctctcagagcagttaccctggttgaaattcaagcagtccaatccgcactgaaccatcgtcccagacgtattctgaactatcttcgcccatgcgattactaccgatgcatggcgtaacagcctagaccactatcaagaattcgttatcatcgttgcacttgacttgaaaattgagggattttactttttcagcctcatcaggtcggacataattatgcgccaacgtttttttgacattctcaacgccgcgctcaatcgtctccgtatccgaactattcgcaaactgccccaataaaaactcaagaacataagttggcacatttgcgccttccttgattctttgcgttagatcttttcggacaaaacgtccaggaaagttttgttccaacttgattaaagtcgcttcattttcagaagtctcctcgtgcgcgctatcagatgtcaaagtcaaaacctccccccacagtgagatccatttgataatcaatcagagtgctcgtattagcctcaacgtttttgatgactaactgatattgacccccacgttcaaagtcctgatcaatcaacggtatgtgtcgacgaatcaatcggtcattgacattgattgaggtaatatccgcgtgaacaagctgttcgccagaaatttgtcggccattcccatcaacaaaataaagcgcgtaagttgctgcacgatgagtttcatccaccggatcgttttgaaccatattgacaataacctcatggctcgtaattcgccggctagaatctgtcactgccaatgtagcatacgtggcctgtgacttgcgactctctgtggtgacatgcaaaaccggaataatcatttcttgaggagaacacccgccatgaacataattttgaccggctccaggtaccgagaacacgttcgcattacttggataaaagacgaaccgctgatcatcgttgcccaagatatcgcccagcttgacgttatctaccccaatttcatcaaaatcagttgatccaattgcgtaacggagattcttttgctcaaagtcgacatcactcggtagattaatcttatctgttgaatccagtagatgacggcgatagataaagccatggtcagctgtcacataaatatttcgaattgaaatagtccgcaaacgatcaacgccccgctctaactcagctatcgcatcctctacggcacgaaatacattgacttccgaagctggcttatcgccagtcgcatcaacggtgttgtgataaaaataaatcactttttgatcgacgacgtattttttctgctctgttgacgaaagtgataagaaatccgtcaaccgcatggcttggctttgcggctcaatcgtttgtaggatatgcatgcgttgctcaagattgatcgccttttgaccatccaccaataattccttgttgccttgatacgcgagttcatgattcggcaaaagcgatggcataccaaaataagtgacagacggcaatcccgtgactgcatattgcatttctgtgccaaaaacatcccgtttgtccagtctttgctgcaattccttagccgcctcaaaccgaaaggcatccgaaataatcactactgtacgatccttatttggccccaccgtggaggagtaaaaattccgctcacgtctttgcggttcgatcatatttggcacataatcttggcaccaatcagagatcatcggaacaagatgctcattgttgtacgccgattcaacatttcgggacaaattgtcaaacaagtcgaactgtgtggctgggagctgatccagagtattgatatatcgacgataagccgtgtcaactaaatagtcctcggtgatataggcctggattaggtcgtcaaactgatcaacatctcggttttcccgaggcaacaaaacgttatgggcatcaacagtcatattataagcgagctgatactccggagaaaagtacattttcccacgtttttcagcaatcgctggcaaagtcatgtggttaataacctctcccagatgccctgccaacaattcagaaatcagccacttcacagcgtgccgatcgaactcaataaacgtgtctgccttcaataaatcagctatcttcaagttcttgaagatttgcgttccgtcaagttgacgccagactttagcagctgcttgtttatatacttcgcgagtatcgttgcgattccgccaattcaacatgaaagacacaacattattaatgtaactgacttcataatggcgaagcattaccggcaaatccaactccatctgataatacgcaaaattcaccatcatggttgccagcagctcttgtaaatcatgtttaccatgatagccatatgctcgatcaacaaaactccaaaatgtctctaaaacctgatatttggcaaattcgtctaaaagtgttggtgccttgataacttcgatcaatatgtttgatagttgtaagtcattcgtcttagcaattgccgcaagctcaacttgttctggattttttccgcgttgataacgctgcttaaacttggcaatacgcgtcttagcggcaaagaatttgcgctgaccttggacaaaggtcaattcagtctcaggcaatccaagttcgtgaagcaacataacattcatatcggctgaaaactttttagaataaagaatcatgtcggtcaaaagattctgatgaatgtctggctcactgaacgcagcataaacaagcgccttccccccggccttttcaatgtccaaaagttcgatttttgtcttcagctgggttcgtggctgcatgattacaattggttcagtcaactgatggcctagttcgtcaatattgtcagcaaactcgccttccttgtcataccaaaagacaaaatgcgtgtgacctttgaacagcttctcaatgccagtgacgacatccttcaattctacctctgccatactttatctactcctacttagcgttccagttagtatcctagcttccagtataaccaacggataaagccgtggctataatcctatttttcttttgttcactccaagctattcttcgggtgttattaaggacttagttgatgacattaaggaagaagattttgatgtggataagggcgggcaagtcgaaattattgggtggctgtatcagtattacaacattgaaccacatgacaaagttgtcaatattaatggcggcccaatcaagactaatgacatacctgcggcaacacagctgtttacaacggactgggttgtacgctatatggttgataactcgctgggtcgattatatctggagtacttccctgattcgccaatcaaggcgaatctgacctatcttctgcctggcccaattgagaaacgcacggattcatttgatctttcaaatctcaaagtgttagatgacgccatgggttctggtcacattctggtttacgcattcgacttgttaattcaaatgtatgaagaacaaggttacggcaaacgagatgcgacagatgcgattttggcacacaacttgtatggactagagatcgataaacgcgcctatcaacttgcttatttttcactaatgatgaaggcgcgccaatacaatcggcggatcttaagcaaattagttcgacacaatcttcatgtgtttgaatcaactgtcgatgtgccaaatgaagtgtttgaaaaaacgaatgcatccaaagataccattgatgatttgcgcacactcgtgtcaacttttaggaaagcaaagttgctcggatcaattatgcattttgagaagaggttcgatttccatgcattattcagtgcagttaattcattaccagattcaactcagttggatttatttggctttcaagcagcaaagaacacccttcaaagcatcttgaagattactcaagttcttcagacgcattttgatgttgtcgcaacaaacccaccctatttgaatcgtatgaatggcgatcttaaaaagtatatcaagaaatactacaaggcttattcaggcgatctcttttcggtgtttatctggaagaacattgagatgacaaagcaagatggatattcagcttacatgactccattcgtttggatgtttatcaaaacttatgaaggattacgtaagtcgattttggactctaaacaaatctctagtttaattcagatggagtactcagcatttgaggaggccactgttccaataaacacttttgttttaaagaataatgtgagtgccgattcaactggtacctatttaaaactttcagatttcaagggcggcatggaagtgcaaaaaaggtatgtgctgaaagctattgctgatccttcagtgagttatctgtatcgtactaaacaaacgaactttgagaagattccggggagtccgattgcctactggccaagtaaagctgtgataaaggggttccaaaatccgagtatatctagtcttggggtggttaaatccggaattatggttcacacggactttgtgagaagatggtttgaggtggacgagcagaccattcaatttcacggcagtcaagttactgatatgaggggcttttcttggttccccataaacagtggtggcggatttcaaaagtggtttggaagaaacctaaaaattgtctttttaaaagataacggagatgtcataaagaggtcaaaaacaaactttcgattacgtgactttaaatattactttaaggtaggcataacttggggaagaattacttcttcagatttatcatttagaatatcacctaggtctgtgctatttggagatgctggaccaatgcttttcactattagtgaaaagcaaatatactatatactagcgtttttaaacacaaaattatctaagttatttgcagagtctcttaatccaactttgaattttcaggttgatgatttaaagagaattccagtaatgctgtccaagaataaagaaataaatcaaataattttaaaaaaagttgttaataatattcaactttgtgaagaaaatgagactcatatcgaagtgaattacgattattcaaatgataagttagctgaaatcgctgagcatcagaagtcacccactacaaaacccttgatcttttttgagttttgtggcaaatatgtgccaattcagtttagggggttgattttttatggtcagttatcaaaaaagaggtaaggtatggcaatacgaaatttcgtataaggatttggacggaaagtttaaaaaacttcgcaagtcaggtttcccacgtaaatcagacgctgaactagcggctagtcaggtgaagtcaatctacctggacattaaacaatatcaggctggggcgatcaccctgtccgaatactttaatcgctggattcacctgtataagcaaaactctgtttcatcggtgaccttcatcaagtatgagaacaccttaagtcacattcagcaattgtttggcggtgtactcttgcgtgacctgacacggacgctgtatcaagaacgtctgaatatctttgcgcagaaccatgctccaagaacagtggcagctttccacaagcagattcgtgcagctctactagatgccgtggatgaacgtatcattcatcttgatccaacacgaaaagccatcatttcgggtcgttcactccccttaactaagcgtgctcttgattatcaagaatggtcccgtcttgttcgtgggttagataccttgaacacagaacaaatgattatttacatagccgctgtcacgggacttagatatgcggaagtgctgggtctgacagagagcgatattgactttgaccatgccgaaatttcggtgaataaaacttgggattataagtatcacactggtttcagaaagacgaagaatactgcgtcagttagaacaattgtacttgattccgtctctctttctagattgcgtcagtttttaaaagtaaataaacctcagacacccaacacggcaatctttacgacagagggacaggcacccgtcagtgcagaaatcaataagattttgactcaaaagttagaatcacttggccttccacggatcaccttccatggactacggcatacccatgcttctattcttctttatcaaggtgtcagcgtcttatccgtttccaagcgtttaggccatagcaacattacaacgacacaagccacttatctgcatgtcatcaaagagttagaaacgcaaggtaacgagaaaattctatcaattttaaaggcaatttaattggcacatctcttggcacaaaaaaggcaatcctcaactgggatcgccttttttgatcacttcaatggtgtcaagatttttgtatcagcttgcgctttggcgtaattgactagaacaccatcatctaaatcaagatcaatatgcaggtttgcaacgtgttgtaacttttcatcgtacttaatcaattcgtccaattctttggtaatcgtggtgatccgcttcttatatttatttttttgacgggtctgctgttcgtcttcttctaattttttttgctgtacaagcttgcgctcataagcttcttgaaggggatgcaagtatttagtccgaattatcgcgacggtgttccgatcataacgatgcaaatacattagcgccttaaagccgccacttcgtcctgaattgaattcccaatatattggtcgcttctgataagttgatagatgatctttcttgaaaaaatcatcacgaagataagcccgaattttttcttcagaactttctccccgcttgcctaaagcatcagcaatgaatttcaagttctcattcaaattttccaaaccgaaagtagtcgtcaaaaactctttgaagcgattcatgatatcccgattatcactaaagtaatcgtcgtcagttagcagaatcacatcgtcctcgtttggggtaaaagtcttgtatttactggcatcccaatctcccccagcataagcaagtccaggtatgtcaattgagtatcggccaaagacgcagccaataaagtacgacataaaagcttttatatcacgaggcaagcaagcgcgtctaacagatacatctttatcttcctcctcgggactaagctcgtcttgtaggccatacaaatcaataaagattcgatttagttcctcttcattggccttcaactggttaaaacgatcatccgcctctttttgccattgttgaaaggcagcttcaacagtccaatttcgatgatgctcagcgatatgctgaactagagggaaacatctgaagtcccaagatgtttcatctaaatcccagtcggtctttgtccaccaaactaactttttgatcttttgtgcaacattatttgacggataaagaattgggattttagacatatcgccaacatttcgagtgattgtaggattaatgatatccagcaaagccttcccaacactgctattcaaaattcccatacacataagcaaatcactttgatttgaagaaaacgctccagaccctttgtttccgtatatagagcctggacttcgccagcgaacgctcaacaatccagaaccaatatctgaccaagtaatcgcttcacgaaagtaataacgcgtatttttaaccacaaaatctggggtttttaagtatggatattttttaagaacgcttctctttatttcttctccgttgttcagataattaataatataatcatagtttccgtaccatcgtctataggctccacctttattgaacggaaaccatttacttccagataaggctgcctccctagtagaatgctctttgaaattaatagctctaaaattgatctcgtaccacattctgataaatcgtttattgtcagatgtcgctaggccctgtctaggatcaagaatttttccaagtgatttacccacactaaaatcatgaattaaagccgggcttgcccagtaggcaataggatgacccggaatcttctcaaagttcgtttgtttagtacgataaacataactcaaatttggattctgaactgcagcaaggaaggcatgttgctttttttgctgagaatcaaagtcgactagacgctcatacgtgccaatgaatccttgaagcttctgcttttgagcgacaaaagctgttgtttgaaccacttcaccaccaatttcctcaaacgcacgtgtacctaagtgcgccatgttgataattggccagctgctcatacgttcacgcaaggctttaaaactggaaaggaacatccattggtgttgtgtaatcatcgcaaagattccatcttcttttgtcagatgttgaagacgctcaatgaaaacagcaaacaagtccgacttgctagcagggtagtatttcccaacgaacttaacaagcgtttttggcatcttgcctgaacccatataaggcgggttggtcacactgatagtatatcgactgcttagtactttcccaacgcgaatcagatttcttagttcccactgatgatgcacctggtctgacatctcaaaagtaagctgccccgcctcacgttcgcttacaatcttgttaataagtttgtcatcaaaaatggagtttttgaaggtgattaatgatccaagttctttgcccgcaccaaatcgacctaatacatcgcttaagttgcccgaatcgcttgtatttccatctttggcgcctgaaaaatcctttaattctaaagatgttgaaggcacttcaaagacattgggatgcaattgcagctcgaaacttcggcgattctcacgtcgcaatttcatcatcattgcaaaatatgtcaattgaaaggcacgtcgatcaatatcaaggccaaaaagatttcgttcaacaatattttgagctgcttcgcgacgtgaatagccttcggattggtagagctgtaataagacatcaaatgcatagatcaagatatgacccgatcccattgcaggatcaacaaaagttatctcttccacacgtttcttagataaactgactcttgaggaaacttcaccttgctttgcttccggcataaagtattgccaattaaaagactgggcaatttgcgaagatgttctttcgtctccccgatcatggagcacacgtatccaataacggcctaatgaattctcaacaagatatttaacgatccaatccggcgtaaacagttgcgttacagctgggatgtcagaagataaatacttcttctttttgaaggcagcgtcttttggttcggtattgtaatactgatacaaccacccaataatctcgacctgtccacctttatccacatcaaaatcttcttccttaatgtcatcaaccaagtccttaatgacacccgaagaatagcttggagtgaacaataattgcatgaaatcgtcagttttctcaaaaagctcaggaagatagtgatttaatgcatttgcttgtttagtaaagagaatgacgtaggccgcatccatatcagttggatcttcagtatcaagtgctttttgaatgatcccatgttcatcaacactataaccaccaagatcatcttcaatttcaaaagcctctcgcaagatgtctggcacttttagctttgtttccgacgacaaaacccgtacgccactcggaagatattcgttaacttccataaagcgaattgcaataatcctgttaaaccatgtgtatgcaacttcttcgatcaaatccgttaatgcatctgaccactcttcttgttttgccatgcctttaagtcgggcaactagttcacgacgtcggcgaatatcctggcccgttattgacaatcctttgtcaccgtaatattcaatttcgtttgtggactgagacattttctcagcaacgccgtctttggtgattccgagattttcaagtttcaatttaatactttcaatcaaactgcgccgagcctgaatcgcgaatgttttgatagcttttttatccatgagtgctcctttcaacgccgccacacgcgacctcagtcgacttgcaatgtcacgattgtgttatctgacagttgtgcctctaacaatcgtttaaactcggcagttagttctgccacatcagcggaatcctccaacttgtaatcaccacgacgaagaacttgatccacttttataaacttcttatcctttggttttatttttcccgtatttgctggcgtaacagatttagtaacatcgtccacatttttgtgcttatcacctgttgcaggcgaaacgactacaattctttcaacttcttgcttaattcgtttggacagttgttccaattgagcgtctgcctgagctggttttgcaactacttggttcaatgttacagcgttctttgcagcatcacggataacctgaattttgttttcaaaatcgtgtcttaattgatcttggactttttcatcagagatgccagactctagaattcgggtaagtcccaaatctttaaattcatcgatttgtgccaaatattcagctgccttcttatcaaaagctgcagtaaatagagtatcaaagtcattatttaattcgctgattttaactgctgtgtctccctgaagcttctgcaatcgaagaagtttgcccatttcatcaacgatattttgtaacttgctatcactcagaaaatcattcgagtcgcgataaactcgcaaggcattgagacctttatcccaaattttctgcattgaatcactgtaatagaagtcacgaataccgtcatccagaaagtcgtcgttccaatctaacagatcgtccttatgcttgccaatgtaatcgtaaaatgcgccagaatcagatgcaatcaaaagttgccgtagcatttggatgccttgttgcagcacagcgtggcctggatattcttgcggtcttgcctcaaaggttatcaaggcatcatatttatttttgacagtctttttgagttcggaagccttctgctcgtcattatcggcttcaaaagacttcttaccaaaaacttcagacgcgactgtttgcatagctttaatcttagacggggcaatttcttccttgatctggaaagctagattcctaattgcctgctttttagtaaagaaacctgcaaggtctcgcgtcgtatattcgtcatcaagaggatcaatgagcttgccattgtaaaacatctttaacttgccaatagcgactaacttcgcaacaagccattgaatgtcctcgtcagtataaccgtatggaatatcgttaaacttcgacaggacactttccatcgtgatatgcgcattgttttgagactcacgacgcatgtagtccaaaacagcatctacggctgcttgattgtctttttcatcaagcgccaaactcgagatattttcaaaaagctcccgaatatccttttcagactttgcaaccgtgatatattgcaaacttcgataggtattgtcgaccaacagcttcattgccttttctaatcgactatcaaagcctgcttcactgctaactgattggccattttcataaatttctgcgctatctaaggctgcaatcaactgttcatgggcatgagcaaactcctcattttgctgggcttgtcgtgttgaaaccatcgcttgatagcgtgggtcagtggaaacattgctgttgacaacgaatttttgaatgcgtaaagcatttcgaatttcaccgacaaagtttgatgaccgcggcaaggcaatcaggacatcgtgattccatgaaccagccgatgctcgcagataatcattatcttcaagaaaatcatcattgactggcgtgatgatgtgcaccgacaacttattacgttgcgcaccgaagatattgtcggttttccgattgaaggcaaagacgtagcgaccattaagcttcgggtaggtcaagcttgtggcaacccccggcttagcattaaataaatagtcgccgatctctttagcaacttcattatctgttacttcctgctttgaaatttcacgggtaatatcttgttctgcgtctgttaaaaagtcataccccttaacagttttctcaacgtacccttgcgttactaagacatctaacgcatcctgaacctgctttttaagcgcaatgcgatcagcatcgactgaactgatcatcaaagtaattaaattgttcaatgatgctgtgaagttagaaacgtatttaaccatgaataatactttgagtaattgcagagcaaatggattcttttccttgttcggattaacagcaggattgtcatgcgcgcgaactagcacgatatgatgtgtgtggtccaaaaactggtccaacccatcaaagaatcggctaaatggtgctaaagtctcagtgctctcgctcatcatagcctccgcagactcttggaaaagcgaaagcatggagcgctccccttcagacaagtgcttgccatccgatccgttttcgcgaatcgccgttaacacaaactgtaagagattaaattgatagggaacaaatggatagttttgggcgaaatcttttggcgattcatactttggccgttcgacatcatcatcgaaatcaaatgagttgttaatagcagcggcgttcgccgaatattgatcttcaagcattttttccgccacgtctgttttttccagtagacgtttgcgaataacttcatcaacattagctgaactcatcgacagacgtgtcttgaaccggccttgaattttggaaaagtcttgtcctgaggcaatgtccgttactttgtcaattgcttgttgggaggtgacaacaacccatgccttgccacgcgtcattgtccctaactgctcgacaattgtttgtagattaagcatgcgttgaacgctatcaccaatgaactgaccaacctcatcagccaggaaaacgacacgatgaccagtcttatcaatatactgcttgaccaattcagcaaaatcatcaatgctgatttgatattctgtgctcaatgtatcaataaagccttgcgcattggcctcatctgagaagccagaattaatcattgctgctttaatggtgcctttgttaaggtaataggcatctcgcaagtcttcccaagacttatgattagcatcaatcgcggtaatttgttccttaaaagcatctaacttaccagcttctgtcagctggcgttcaaggtcggcaatccaaaagtcagcatcggtaaatccttgcatttcattgaaaacacgcataaacactttcaagatgctttgtttatctgagccaacggtgtctttggcttttgcgtcaatgttaaataaaatgacatcattctttgccgaagcagctgcatgcatctcgttaagaatcatttggtcatcgatcttgtcatcgaagtaatcgacagcatttttgccatcaacgaccttattagcaagaatatatgaaatgatcttcaagaagtgcgatttcccagaaccaaagaagccagaaatccagacccccatgtcatccgttggtgtctgaagactattatcaaacgcgttgaaaaaggcctcaaaatgatctcttagttcactggttacgacatattcgtccaactcctgctttacattcgcttcatcatcttgatcaaccttgataacaccttggatgttacgatcaatcggtcgtttaaaaagctctttaatttccattccccaaactcctcctattcaactcgaaatgcacggtagtagttcttgtcatctagtttgccaaacgcgcgaagagacaaactgttataactgcctggataaaacatcacaacaggcgtttggttaatcacttggttcatcgtgttcaagacacggtgggcacgaatcagtggaaacacctgaccaacaccggtgataaaaataatattgcgctcatcccgatgttccagatgatccagtatgtactgaacgatcaagttgcgttctttacccatttttaagacattattgatttgcctaatcaccatatcaataccgtctttttcttcaatttgaatgaactcttgcagataacccatctcatcaatcagtcgaataacgacatcaaacagattaaacacttggacatttgcaccaattgaagcagtggtcgagttgtgcgcaatatcttcgacctcattacgaacgaataactcatcttttggatcgtaatcgaaaatatagaagccgacttcattcgagagccctcgattttcctgaaaagcaggatctcttattttttttcgaaatcggtcaaagcgttcacgtactaatgtcataatgctctccccgttagtgccaaaatataatcagactttccattctgtttaagccatgcgaccaatgaagcctccagtaaagctcgttttaattgcattgcacctccggcatcttcagccaagccactttgcgttaggatttcgtgaaatctagtctgaatttttttcaaagtttgctgcgtccaatgagccgtttctggatgttgcagtggtaaatcttgcaagtaagcactaatctcatacggttcaagtttcaaatcaccagtcaaaaattcttttttcacaacttctaaaacaaagtcttctaccagaggatgtgcattcatgatcgcaattagattcattaacttctgattattgaggggtaactgctcaaaaagctcagaaaaacttgctggtagagctgaaattcgaaacatcaattctctttttaactcagtagaccgatttgttgaagacatcttgaagatgttgtcgtcaatgatggcttctgcaatgtcatcccaatccttgccattgttcagcattgagatcactgcagaaaattcaggaaaccagaaggtacgagaaataaaggttgccgaaaatttcttcaagttgatctcctttctaagtttatttgttcaaaagtcaacagggtcttctcattacaaaatactccttttcattgtatcaggatactaacatgattggggcaactttctggacttattagcccttcgaaacacttgaattcattacaactcaagtgattcttaagctgcacgcgattcaaaccaaatcgtttcacagatacggttaaatagcctacctacccagctgcgggcaactgctttatattcgctatcattgtgtatatatgcccaccacccaaatgtgctaaagtaaggctttagacaccatcacatcgaaacatctttggagtgagcaaacattggctaaagaaacacatcacgtcgtcatccccgacgccatcatggaagatcttgatattaaagacggcgagcaagttgaagttactttaaaagataaggaagccgtgattcggcctaaacggacggacacggggacgcagacgatttcgctacggttcttcctgattcccacggttttggctggaatcacgtttttggtctactttatctatttccagattttgcaggtgccaatgacgggaaagaactcgattgcccagatggtcattgtgctgggcgagttgagtgggatcgctacgtttgcggttgcttacattcagaatcatcgccagattcatgggcgggatcatcggcgccggtactggcgaattttcccaacgatgctgttgtcctttgcaattattctcgcgtttgtgacatcagtgtttttctgggtgattggctatatgtttgaaggcgtcagttttgatatttatacggcgactgggttattcctgttgtttatcagtattgtgaactacctgatgatttattcggccttgtcgatttcgacctccttcatcacgaccctgtttctatcgaccttcgttggcggtgtcattggcgcgattgtgacgaacagttcgcgccagtggtggcaacataacgtcagttttcttggcacgaacaaggctttgaatgcgtggcaatttaatctcaccatcgctgtgtcggccttgctgtggatcgcgctggtggattatctcttcgtaccactgatggcgcatcgcaaaaatgattggcggttgatcacgatgcggatcatgttgacggttgcggcgattgccttgctgggcgtcggccttttcccgaacaatcgcggcctcatgcatatcttgcatacacaaagtgcttggttcctgaattatttcatcatcggcatgatcattgcggttcgctggctgttgccaggcgtttcgcgcgaatttttaagcaccagttacatcatcggcggcatcatcattttcgccgcaatcctcttccagttcgtccactacttgtcactgacagcgtttgagatgatcgcctttgccctcgcgatgtcatggatcatgttgctactgcaaaacattcaccggctttaccagaaagacgagtctacgtttgttgtgacggtgacgacagacaaggtaaacactgactagctttgatcaactgttgcttcctgtcacactcccatttagcgtcgtgataactcaaggagattatcacgataccgactgctaaccgttccacaaaaatgcccctagtaccaacagatgattgagacatctgctagtactaggggcatttttgtgttaaaaagctgggaaataattttctatcatcgaaataatgaccaacgatttccgcgcattttagaatcaagttagccactgtctcaaaattttttggacaataaaaaacatcaagaacagatatcctgtatcattgaagttcctacacaaacaatggaagaggatattgtcttgatgcagaaacaggatagcacacaccgccaaaaaggtcagcacttaacatcactcgagcgcggaaaagtggccggattccgccaagctgggaagtccaatcgttggattgctgctgaaattggcgtctgcccgcagaccattaataatgaaatcaagcgaggtacagtagatcaggtcaagaagagtaatggcaagcgcgtctaccatcgacaatacctcccagaggctgctcaggcacgttacgagactgcacgcttgagctgccatcgtcctgacaagttcgccagcgtacaggtcttcttagcctggtacgtacagcgagctaagcaggacaaatggtcgccggatgcttcaatcggctatgccaagcgacacaagctgtttactcctgaagagcttgtttgtgcctcgactttgtaccagtacattgacgaccaacgcctagatattcgaaatatcgacctgttggagaagactaagcggaagacctctcaccagcaccacaccaaggctaagcgcctggctggccgcagtatcgaggaacggcctaaggtcgttgaacgacgcaggcagttcggtcactgggagatggataccattgtcggtaaacgcaatggcaaggagagcgtcatcttgactctgattgagcgcaagacccgttgccaacttctccgcttgatcgaaggacgagatgcagactctgtgagctatgcattgcgtggaatcaagcgcgaatggggagcttgcatcaagaccatcacagccgacaacggacccgagttcaccgccttaaatactgcttttgctgggacggaaactgagatcttctacgcccatccttacacgtcctgcgaccgtggcaccaacgaggcacataaccggatgatccgccaggacttccctaagggcatgtccctagatgacattagccctagtcaagtgcaggacacgcaagaccgcttgaatcagttgcctcgcaaacaacagggctactgcacaccccagcaaaactttgaggccgaagctcggcgcgttcgccgcatggcccagtagtctctctagcgccacaacttctatttgataacggcctgttctgggattgtcctcaacgactggctaacttgttcttgcaatttacggaccaacgatttccctattagaagaaacttttttcttaatcctcatagaagatatatgacgatttttaaagatcccagtgccaaagcggagcaatcgtaggccagatggggctcagccgtgcaaacaacacagcgacggtctgtggagctgatgttgttaggcgacttcgagaccgcgggccttgcgggctcgaagcgccgtctccgctctagcttcgcgtcgccacccatctggccagagattgcggagtttggcacggcatagaactttagcctagggatttatccagataattcagaatcattgtgcaattcgagatgttttagatccaaaccgtacctaactcggctctttattaacatcaagccggttcaaccgattcaaccttcacatcttcacgctgcaccgcaagcaaatccgcacctgcctgaaccgtggtatcagccgccactggctcgatccgtgcataagacttgctgttggtaatcagcacgatagtagtcgcgtctagcccagcttttttaatagctgcttgatcaaaggttccaagcaagtcgcctttgttgacgtgctggtcggctttaacggcgactgtgaatggtgcacctttgagattgacggtatcgatgcctaggtgaacgaggatttccatgccatcatctgtcgttaggccgtatgcgtggccggtgtcagcgacgacggataaggtgccggcttgtggtgcgtaaactttgttgatgctaggttcggcaggcttgatggccatgccttcacccatcatccctgaagcgaaaacgggatcgctgacttgatccaacgcaacggtttcaccgccaaccggtgcatagactttgttgtcgctgacggttgaggagatcacagcattggcggtttcgacatccccgtctggcgttagcacttccttcgggatcgcaaacgcgttagtcgcaacaaaggccgcgacaacggtcccaagtgacacgatggtataccacaacaacgcatggccgttataaatgtacatcagataagatggcaccactgcaaggccatacgagttagcagcgacgttgagcatgcttaaaatcgcagcgccaatcccggatgtcaaaacggtgacgatcaatggccgaaagttgtagcggattaagaccccaaacaatgttggttcggaaaccccgaatagttgtgaggtaaaggcacccattgaagttgctttagccttgttggaacgtgcccgtaagaaaatggcaagggcaacgccgaggttggcaaagccatacatcgcttcaagtgtgatcaacggattcaagccggttgacgcgagcagcgaagtttcaatggcgatcatggtctgatgaatcccgatgagaaccatcagtggataagcagccccgatcaggaacccaccgattccgaatggcagatggatcacggcttcaacaccgacaagcatgccactttcaatagcgtggacaattggaccgacacccatgatcatgatggcgaacgtgacgagcatcgtcaaaaatggcgtgagaatctgttccaaaacgttgggtatgtgacgccggaagaatagttcaagtttggccccgataaacccagcgaccaaggcggttaacacggagccttgactaccaacaactggcaaccagccaaacagcataatggccttggcactgccatcagcaaccgaatacgcatttggcagaattggcgaaaccagcattaaaccaatgacgatcccaatgatcggtgtgcctttgaagtagcggaaggtcgaccagacgatcaaggcgggcaagaaagcaaaaacggtgtcagtgagcaccgagattactgatgtcaggctagccggtatatcgcttgggaccgctccgaaaagttttaatacttgcgcattggttgctgcacttttcagccctaagaacagaccggtggcagcaatcacaggaataattggaatgaaaatgcctgacagcatcgccattaatcgttgtacgactgtcttgtgctcgttgctggttttaccggcagtatcggcgtcgtctttaccataaatcgcattcacggtgccaagcttggcaatggccgcgtagacatcgttgaccacgccggtgccgataatgacctgatattggccagagccatagaaaacacctttgacttccggcagcttctcaagggctttgtcatcaattgccttccgatctttcaccacaaaacgcaatcgcgtctggcaatgggtcacggaatcgacgttattttcaccaaccagctttaaaattgcttttgcttcttcttcatagtttttagccatgatcatttctcctcaataagaatcgcttgatagggttgtaagctcgttccaacgtccgggtaattgttcagccaaacgtgaccagctggtaagtcaactgcagctgacttcgagctaagattcacaaaaatttggacatgttgcccgcgggcataggcaatcacgttgtcgttgtgtgcatccagcggggcaaagtcgccttcgatcaaatcggcgcgcaatggcgaggcattccgcaggcgacagagcgtttgataaaacgtccagaccgaattgggatcatcgtgttccgcctgccagttcacgccagcaacttgcttggccagcggcaaccaaggttcatgaccagcgttgaagccgccattttggctgtcgtcccatggatacggcgtacgagcattgtcacgtgagcgccggttgacacaggtaagcgcaacgtcttcagagtagccttctgccagtgcacggcgatagttgtcgtgcgcggaaagatcgttgaattgatcaatgttggttcgcaccgcattgaccatgccgagttcttggccttgatagataaacggacagccacgtaaaccgaagtataacagtgctaaggcttttgccccgatcgcattgcgatattgcggctcacggatatacttgcttaagcttcgcggttgatcatgattttcaaggaaattagccccccagccaactttttgaattgccagctggcttttgccaatcgcctcgccaagcattttcggcgtccagttggtttgcttgaaccactcggacccagaagcgacgtcaatgtcggcgtaatgaaaatcaaaaatcattgagaagtagccgttttcgccaatgaagtcaccgagttgatcgtatgcaacgccggacgcttcgccgatcgtgacggcattggctggtttaaaggtggcagcattcaactctttgagaaattgatccagacccggtcgattttccgttttgcgcttaaccttgcctaacccatcgctgccatctggcgtgatggaagcaaaatcctgatcctttttgataaacgtaatggcgtcgacccggaatccggcgaggcctttggctagccaccagttgatcatgctataaatggcatgccgcaacttcgaattttcccaattcaggtccggttgttgtggggaaaagacgtggtgataataggtgttgggctcaccgggaaccgctgtccatgacgagccagcgccgaagtttgagcgccagttgttcggcggctgaccatcatgaccctggcggaaaatgtagaagtctcgatatggtgaggccggatccttgagcgccgcttgaaaccaccggtgctgatcggacgtatggttgaccaccaaatccattaccactttgataccgagatctttggcagttgccatgagctgatcaaagtcagccatggtcccaaagcgcggatcaatcgcctgatagtcggcaatgtcataaccattgtcaaccatggggctcttataaaccggcgataaccaaatcgtggtaatgcctaattcttttaacttcggtaattcggcagtgatgccaggcagatcgcctatgccgtcattattgctatctttgaatgaggcaggatagatttggtagaaaatttcttgttgccaccaagtacggctagtttcgttcgtcatgactatatcctccagttagctaatgctgttgtatgaaaatatggtatcgattccatatgaggcaaaaagaaaactcaggcgctttgcctgattttcaatgataagtgcaaggttggttgcgtgtcttgggcgacttgtcggcccaacccctttaacaactcgtgcgtcgccgccgctgccatcgaagcaacaggctgatgcaccgtcgtcagcgggattttagcaaaaggcgcaaacggctgatcgtcatatcccataactgcgatgtcgtcaggcaccttcacatcggcagccaacagactgtcaatcacgccgactgcgacctcgtccgaattggtaaacacggcatccggtcgcacattcggcgccaagcttgcgagctgcttgccaactgcctgcccttctttggctgtgtgaatttgaccaaacagtaaatcttgcgccactaaaagctgatgtgcctgcataaagtctaaaaacgcttgcgtgcggctttgtccatggtgggcgccgctgatggtgccaccgctgacatacgcaaaccgccgatggccttgattgaataaatagtcgagtgcatcacgggttgcctgataatgtggcaataccagcgaagtagcaccggggatctggacatcggcattgacaaccacaacccgccccggaaaggccttcgcaactgccataactcgatcaggggcttcaactgaagctaaaatgacaccgtccaattcgcgacttttcagttgcttgagaaaccgttcttcggcctcgggatcatcatatgtctgggtaatcatcacttggtagccgtgggcatgtagttcccgttcaatcgcatcgaacaaaccagcaaaaaacggattggtcacgcgggataccagaaccccgatgttgccagtggcttgggcgcgcaatgacgtggcggccgcactcggcgtatagcccaactgatgaattgctttttcgatccgcgtacgcttttcagcggagatgtagggatgatgattcagatagcgcgaaaccgtggtcacgccaacccctgctgctttagcaatttcactaatcgtcgccattccttgcatctccttttgtatggaatcgatttcatagacgagtatacagcgctttcaaaaattgtcaagcattgactaaaaagattttttgcgtcccagtctaaaaaagccttacgccgtgtcgccacaacgtaaggcttgcgatcaaagaccgccattatcctttttaagattccatgacacaacatcactggccgctgacggtggggtgacacgtgccgcggttggtgcttcattgccaaagaagcgaccggagacaacgcggtagccttggtcaatgaataattcgaacacggatacatcaatgaacaagcggatttcaactgttttcccagctggaaagccgaactggcgcaaactgccgccattattgcgattctcgcgctgaatcatcccctgcccgctatcagaatcgagatgaatcagcaactgatcatgatccccatcaggcagatgaatcgttgtcttttgacctgccgcaagcgtgagggctagttcaaaggcgccttccaagttggtaacggtccactcatcatcgtgctgctgaatgaccggtagatcttctaccgctgtctcccgcagatttttgatagctgggtgcggatagaggcaaacgtgatcatcacgcagcgtcaattggcgcacataactcaagaccccggcccaaccatcatcatctgttgggtaggtggtatctggcaagccgagccatgaaatcgccaaggtgccatcatcatctgtattcgccagacgagtcgcataaaagtcaaagcctttgtcaatgttttgcagccgctggtgggttaagttaccagttgtcggatcaaagctatcggccacgagggcaatgttcggatagacattttcatattcgaaaaagtcctgatcgagaccttgtgggcagtatactaggaccactttgccattgatgaacgtgatgttcgggcactcaaccatgtagccgcaaaattcatcaggaatgctcagcggtgccacaaaccgccagctcttgtcagtctgcttggcataaagcagaatggcgccggtgtgatctggacgctggccgccaatcaggacataggtctggccttcatagttaaacaagaatgggtcgcggaactcctgggtgtagccagtaggcggtgttaggactaatggcttcggatccttgaacaaccggccatcagcgccgagaacggcccctagctgggtgctatgccgatgccactgatcatcccgcgcattgccggtatacatcaagcgcaacgtgccgtgtgtcaccaacgctgatcctgtgtaagccccatgcgagtcatactcgttatctggcaatagatcgcctggcacccgacgccagttaaacaaatccttcgacaccgcatgcgcccacgacttcaggccatggaccgggccaaacggaaactgttgataataaaggtgccatttgttgttgaaaaagttcaagctgcacgggtcattgattaaaccagtatctggttgaacatgcgtctttgtccgccatttactcgcagcaacctgagccttcaacttcataatataatcaggcgcccaggacgaatacggctgataccgcgccgccgtactccaagttgcttctttcatgaacttaccaccttgtttgaaatgttacccccatcatatatgagttaggggcaatgtcaatgaagacagatagacaggtttctgaaatcttgatgcaatcatttttgggagggctcgttgaccaccgaaaggacgaggtggcgccgcggtgattcgggatggtgcccacgaagctagcgtggtgggcacggactttgagctaacgggcaaatccggtatgctagctcaaaactcggccttctcctaaagcaggcagcacatctgctttaggaaaatctcaccactgagaccatcgccgcggaaccagctcaggctagcggataaatcgctgcccaagatagatcctgaaaagcgatccgcaaccaacaaacttgatgcaaaaaatccgcagcttaggccgcggatttttgattggccgatcggagggtggccgatcagcgattttttactttggaggagtaaaaatgaaaaagttgggttggggaaggaatgagtgggtggctcatttctatgttgttaatactacaagcgatgtgtgaaatttttgtgatggtaaatgggtctttatgttaagtctgttgattaaaatcatctgctcacgacagcggtttaggtagaaattctgcccgataatcatgaacgtattgctcaaagctgattgctgggcgcccgagaacatttggcaatgttgtcgtaaccgttttggcgttacctaactgggtgatcaagtaaagcatcaccatgacattgacatagttcttcggtagcccgcgttgcagcatgaccttgcgaaaacgccacaaactcggcttgctataggtgatcggcacaccgagttccatcgtcatgatctgagcagcatcggcgtaggtgagcgcttgggcgccggtaatgtcgagcttttggccaatatatgccggatcgcgcaggacaaccgcagcagtcgcgccgatatcacgggtatcaatgaaactagtgcgagcatgcccagcaggcacaaacagatcgcgatggccgacgatatcagcttggtgggtggtattcaaattttgcataaagaaacttgggcgaatgaaagtataaggcaaaccgagttcaacaatccgtttttcgatttgatgatgcggcgtcattggattatgcgccaccccaagtagtgacacaaaaacaacttgcttcacatgtcgagccaccaaggcatcgagaaaaggatacatatcctctttgggcttagccaattgtggcggccgaacgaagaagaccttgtcgatgtcagctaaggcttgctcgaaagtggcaggatcgagaaagtcaaaccggcgtacttgaaccttcagcccgcttaacgcctgtttggcatgttccgaattgtgcacaccagcaaataggtgaacatctggatcatcttgcaagtcgcggatcagcggttgaccgatattgccagtagcaccaatcactaatagatttgtcaataactttctccttataaagaaaaagtgcctgaacaggcacttttttaatctcgatcaccgcttaattatcgcggttgaccctattcatacatataagcacgggttgccggcagatcttttccagacggccccttgctgatcaaatactgcatcacgtcaatgttgccagattcaaagctggcagcggccgcctgcagataaacatcccacatccgcgtaaattcgtaaccgaatttttgctgaatcggattgcgatgattattgaaattggtatcccaaatctcaagtgtgtgttgataatgacgccgcagtggttcaagatctgcaacttgcatgccagcatcgacaatgtgattaaggttttccgccatccccggcacataaccatccgggaaaatgtatttgttgatccatgcgtttaccgcgccgccttgttgtcgcgtgatgccgtgaatcaatgccacaccgtcatcttttagcaacttagcgacatctttaaagtagccttctagattttccttgccgacatgttcaaacatgccaactgatgtgatgtaatcaaatggctcgcgattcagttcgcgataatccatatacagcacctcagcgacatcggatagatgttctgattcaatccgatccgaaaccagtttaaactgttccttgctcaaggtgatgccgacgaccttcaagtgataggtcttagctgcgcgtaacatcaacgtgccccagccgcagccaatatccagcaatgtccgccccggctgtggattaagtttccgcaaaatatgatcaatcttatttaattgggcggtttctagatcgtcactccagtcctcaaagtaggcacaggaataagttaaagtcggatccaaccaaagtttataaaaatcattgccaagatcgtagtgagaatgaatgtcttcttttgacttatgttcggtatgactttgcttcgggagaaagcgcatgagtttcttgttgcgcataaaactgcccgcattcgcataagccgccgcgattaattgttgcaatggccgtgtgccgccaagcacttcaatgtcgccacgcatataagcctcacccagtgccaacgatgcatttttcagcaaatcacggaccggaatggcctttttcattttaatcgtgatcgttggctcacctgtaccatacgtttcttccgtatgatcccagtagtccacgcgaaccggaatattgaaagagtgactgaacatggtatgataaaactttttttcaagcatgatggcctccgttttgagaagttacaagaagaattatacggctttttaaccaaagaaaaaacaccgccgtgaaaatggacggtgtgtagccgttttcatttaaaattttcgaaaacgctgctgtcgcttggcaatcagtgcctgcggatcagtagcaactaattctgcgagcttgggcttgatcgctgccttcaacgtcgtcgcgaaagtcgtaccggtatccggaataatacgatcacagaccgctttagccaataaatcttgcggggtcagttgcatgaccgcggccgcctctttagcacggctggcatccttccacaaaatagccgcaaaaccttctggggatagaatgctatacatgctcttgtccgtcatccagacctcatccccaaacgccaaagccaaggcaccgcctgacccgccttcaccgatcaaaatcgcaagaatcggcgttgggagatcagcacaggtgtataacagatcagcaatagcggcgccttggccattggcctccgcctctttgccaggatatgcgccgggggtgttaatgagcgtgacaatcggtcgatgaaacttggctgcctgcttcattaaccgtagcgccttacgataaccccaaggctcaggactgccaaaatgcgtctgcaatcgctccgttaagtcttgccctttatccgttgcaatcacggtcacggcttgctgatcaagccagccaatgccgccaatgacagccggatcatcgtgacttgagcgatcaccgtgaaattcatgaaagtttgtcaccaacccgttaatcagttcccgcgtgcgatatggtcgtggtgctctggctgcttgaactgtctcatacgctagcgtttctttatccgtcatgattgaaagcctcccttattgctgcaactgtatgcctgtcgatgtgtttgtcagacggctacgcgtgatatgaagaacgctaggcaaattgatccaagatggcaatcaatccgtctagcgtcgcgtcaccatgcctcatcaaatgtcactgttcaagctgtgtgcaacgccaacaaatcccctaaataactaggctgatcctgccgctgtaccactgcatcaataaaaccgctttgcaaaagggtttctgctcgctgaaagttttgcggcagcttttggttaatcgtttgttcaatcacccgccgacctgcaaaaccaatcaaactgtgcggttctgccagcgtgatgtcgccttgcatcgcaaaactcgcggttacgccgcccattgttggatcggtcaagacactgatgaataacaagcctgcattgctgtgcgctttaactgcggcacttactttggccatttgcattagcgaatgaataccttcctgcatccgcgcaccaccgctagcgcagaaaagaacaactgctaaattggcgctagttgctttttcaaataaccgggtcaaccgttcgccagtcacagttccaagtgaacccatcatgaactttggatccatgataccaagcgcacagctttgaccaccaatcgtcgcctgacctgtccacacactgtctttcaaaccagtagcagcctggcctgctgccaatttctcggtatagcccgggaaatccagcgggtccgccgtcaccagatcagcatcccattcttctgttgctgtcgcgataagtgacaatcgttttttagcagtgattcgaaagccgtaatggcagtgcgggcaaacttgagcattgcccaaactctcacgatagctgccttgcttacaatacggacattgaatccacaagttttcgggtaaggctgcctcacgagcaagtgcttcttgggtcagttgtggttgtgacatgcagtatccttcctttcaaaacgcgttcacaggcccagaaacctgcacataaggacctcaagcctaaatggccaaaacccagccatttaggcttgaggccacttatgtatgcttcggtttctaaacgggcctgctcacgctctgcttaaacgcgctctccagcccagaaacctgcatgtaaggaccttggtcgcaatggcccaaaaccggccatcacgcccaaggccgcttacactccggtttctaaccgggctggttcgcgctctgccattttggtaaaaagtcgcgattgagataggcggtatcggctttgccggccagaactgtcggtgcttggaataacgccagagcaaaatcccggttggttttgacaccttccacatgcaattcaatcagtgcacgatgcattttcgctaaggcctcgtcacgggttcgcccatggacaatgagtttagcaatcatggcatcataataggggctgatcttatcgccaggcgcaacgccggtgtcaacccgcagccccatgccgccggttggaaagcgtagttgttcaagggtgccaacgtctggccgaaaatcatgataaggatcttccgcgtttaaccggcattcaatcgcaactcctgatggctcaggtgtcgttaatgccacttcatcgccagctgcaactcgtagttgagcttggaccaaatcaacaccggtcaccatttctgtaattggatgctcgacctgaatacgcgtattcatttccatgaaataaaaatgatgctgctgatccatcaagaactcaatggtaccagcattgagataatcgactccttcagcaatggttgcagcgagatgaagtaactttctgcgctcaggtgacgtcaagactgggcatggactttcttcgaccatcttttgactgtgacgttgcaagctgcagtctcgttctgggaaaacactggtatgcccgtgcatgtcgcgtaaaacctgaacttcgacgtgtttggcagggacaatgactttttcaagatacatcgtcggatcgccaaacgccgcttgagcctctgcttgggcccccgcgaattcagctttcaatgcggcagcatccgttaatttgcgaatacctttgccgcctccgcctgcgctggccttgagcatcaatggataaccaatggcctcacctgctgccagcgcggtttcaacgtcctgtaaaggatgactgcctggaatcacgggtacgcctaagtcaatcatcgtttgtcgagcaacggctttgtcgcccatttgatcaatggcagtcggttttggcccgataaaggccaatccggcatcggttacgagtttcgcaaactcggcattttccgataagaagccgaacccggggtgcactgcctcggcaccgctcaaaatagcggcactgacaacattgcgcatattcagataagagtcggccgcccgcggtccgccaatacagatggcttcatctgcaagggtgacatgcaggctgtgacgatcagcgtttgagaacaccgccacagaggtgatgcccatttcgcgcaaggtctggataatccggaccgcaatttcgccacggttggcaacgagtacttttttgaacaaagttccacttcctcacacaaatctggtttcaatggcagtttcagccaatagcaaaaactaaatccgcactgctggccatgttttcgccaacataaattttgcctttgcccaaacctgcattgtcaatcagtttctccaaggtcacttcaatccgcagcacgtcgcctggacgcaccatgtggcggaacttggccttcttaatgccgccaaggtaggctgtctttcctttgaagtccggcatcgaaagcaaggcaatcgcgccagcctgcgccatggcttcaatctgcaacacaccagggaaaattggattaccaggaaagtgtccctgaaaaatctgttcgttaattgaaacattcttttgtgccactacggattcaccgggcttaagatccaagacccggtcgaccattaacatcggatagcgatgcggcaaaatggcctgaatttcttgtgcttcaagtgttttcttggtttcgagcataatgccctccttttaaatgcgttctccagcctagaaatctacgtataagagccctgaacgcaatgccatcaggttcagacccgcgtacacaccgatttctaaacgctcctactcacgctctgtcttcttcaattgtgactaatgcctgatcatattcaacgaggctttcattgtcgacgttaatcgccttgagtgtgccgctgacggtgcttttgatttcgttcatcattttcatcgactcaatgatgcagaccacatcgcctttgttaacgtgcgcgccgacttcaaagtacggatcagcgtcaggtttaggggaaagatagacaataccgaccaatggcgccttaatcgccgtgcctgtcggagcttctggttcagctggcactgccgtttccggcgttaccggttgactaggcactgttgcctgagtattaacaattggcgctggagccgcacttgctttgaccagatgtaaagaatcgttgccaagcgtcagctctaattcatgcaaagaactttgctccaattgtttgatcaggacttcaatcatttcggtgtccatgatgctcaccaccttttgaaggccaagaccgcattatgcccgccgaaaccaaaggaattgctgagtgcatagtcaacttcgacatcgcgattagcggcatccaccaaggtgactgggcattcaggatcttgctcagcatcaccgacattgatcggcaatttaccttcatgcagcgcgctaatcgtcatgatcgcttcaatcgcaccagccgcacccagtaaatgaccagtcaaagccttggtggaactcaccaaaacatcgtccccgaaaagatcgtggatcgccttgctttccatggcatcattagccttggtcgccgtgccatgtgcattgatatagccgacatcacttggcgcaatcccagcttcttcaatcgccagttccattgcccgtgccgcttgatggccgcttggatcaggcgccgtcatatgataagcgtcgctcgtagcaccataaccaacaacttcgcctaaaatgttggcaccgcgttgttgcgcatgttcgaggctttccaagataatcgcaccgccaccttcgccgaggacaaaaccgctgcgatcagccgcaaatggcaaacttgctttggccggatcggcagccttggataaggcagacagggctgcaaaaccagcaataccgatttcgttaacagaagcctcggcaccacctgtaatcacaacatcggctttaccactttgaatccgcatggctgcttcgccaatggcattcgtggctgaagcacacgcagtcacaacgacatagctcggtccgtgcgcgccaaagtactgagaaattgtcccagcgaccatgttgctaatcgcttcaggcacaaacagtggacttactcgatcaggacctttggcattcatttttgtgacttgttcctgaatggttgtcaagccaccaatacctgagccaaaaatgacagccattcgttcagaatcaacatcatctttagttaaacctgactgttcatatgcctcgattgcactgtaaaggccatattgcgtgaaaagatccagccgtttgctcagccgtttttccattcgcacttcaggtttaaaaccttcgacctcaccagcgactgtgatcccggtcttctcggcatcaaacttagtgattggccgaataccaatcttgccagcatccatcgttgccactgtttcggcaactgaatgacccagcggattcacagtacccattccggttacgactactcgttgcaatgtcattcctccgttcatgtacttagcctaatccaccagcaacagttaatgtttgcccggttatgtaggcattttcgaccagaaaacgggccacatgcgcaatttcctcaggttgaccgaatcgctttaacggaatctccgccaaaatctgatcctgactagcctgactcagcgctgcggtcatatcggtagcaatcatgccaggtgcgatcgcattgactcgcacgccacgcatggcaccttctcgtgctaatgttttggtcagaccaatgatgcccgctttactagctgcataattggcttgaccgatgttcccggtcaaccccactacactggcaagattgataatgacgccagtgcgtgccttcagcatttttttgaatactggctgactcacatagaaagtcccatctaagttgacgctgacaacccgggcaaaatcttccggtttcatccgcatggccaacatgtcactggtgattccagcattgttgactaaaatatcggcactgccaaacttgtccagagcggttgccaccagctgctgaccggttgctggatcgtcaacactgccaaggacagtgacgacgccatgaccaaaggcttcaagctctttgatcaactcagtgggaaattcgtggcgggcgtttaaaacaagatttgcgcccgcttcagcaaagtttcgggcgatcgcttcgccgatgcctcgtgaagcaccagtgatgatcgcggttttatcagttaatttcaatctgccttcactccgttattcaagtcaatgactgcattgaggctcgctgcgttactgatcaagtgtgtggtcatactgcgatcaatgcgcttaatcattttgctaagcactggttttggtcccagttcaatgaccgtgtcaataccagctgccttcagttgccgcaccacatcagcaaacttagtcggttcagccacctgggccgccaaaattgaccgcatgttttcagccgagaagggctcaagggccgtggtactgatgaccggtgtagctggatcaaagacatgtacttggtcaagggcagcacgcaatggtggctgcgcatcagccattaacggactatgaaatccgccagcaactttcagtggcacagtgcgaacgccttgatctgacaaccacgcttcaacctgcgccaagccagccttgctgccagccagtacggtctgtttagggccattgtaattggctggccaaacatcagacgcttgttgacaggcagccgcaatcacagcagtatcgccagtcatgacggctaacatgctgcctggatgggcctgacaagcagcggccatcgcctttccgcgggcggcaaccagcttcaacccatcttccaaactgatcccgccgccagcaatcaaggcactgtattctcctagacttaagccagcaagtgcggtttcatcgggcaatgccgcggctgctacttcatgcatggccacgctgtacgcaactaaagccggttgcaaaacatccggatgagcagcaaaatccccagtcgccaaaaactgcggcagatcgaagtccaaaactgcatcagcgcggtcaataatctctttgaatatcaaagtattctggtaaaaatcaatccccattccggggacctcggcaccttggccattaaacacatatgcaaaacgcaagcaagtacctcctcgtttcaatgcagacgtttgccgttaagcctgtgcctgcacatcgacttgacctgtcaataaggccgccatttttgagccagccaaaatttctttggcctgacgcatcacgtcctcaacaatgtcttcgctgctttcttcacgcttaactaagccagcaatctcaccagccatgaaggaaccatgttcacgatcgccttcaaggacggctttacgcaaactgccattaccaagttcttcaactgccgaaaaatcggtcgtgtcagaaagggcaattttcttttcaagtttcaggaaattccggctcattgggttcttcaaaacacgggcagcatgaccgacatacaggccggttaccagtgtatcaacgtccttggctttaatgacggcgtccttgtagttctggtggattcggctagacgttgacgtcagaaaacgcgtccccatctgaacaccgatggctcccaaactcaaggcagccgccacaccacgaccgtcagcaataccgccagctgcaacgacgggaatatcaaccgcatcgacaacttgtggcactaaggccatcgtggtaatgctaccaatatgaccgccagattccatgccttcagcgataacgccgtcgacaccgtcttttgccatccgttttgccatggcgacagacggtacaaccggcatcacaatcgtgccattttgctgcaaccgttctaagtagcggcttggatcaccggcaccagtcgtcacaagcgcaaccttagcgtcaacgatcacgtcaatgacttgttcgacaaatggtgaaagtagcatgacattcacaccaaatgccttgtcagtcagtgacttggcaatatcaatttgctctttgacccaagaagctggggcatgaccagaaccaatgatgcccaagccgccagcttcagaaactgatgcggcgagcttgccgtcagcgacccacgccatgccgccttgaaaaagcggatatttaacgcccaagcgttccattaatggactcattggcccactcccttcaagttgtcttaagcttcagccttttcggtgatgaagttaacaagatcagccaccgtttcaatgctttcatcggtatcgatcttaacgtcgaattcgtcttcgatttcgttgatgatttcgaaaatgtccaaactgtcagcatccaaatcattcttgaagttggttgtcagttggacttcttccggcttcttatccaattggtcagcgataatgttttgtaccttaggcaatacttcttcgtttgtcatgtttaatgttctcctttaaagttaactattttgtaagcgccagcagaagcggacccataagcgggcttctgcgactgcgagcgcatcagactcaaacatactgttaataagtgacgatcaacgaaccaacggataaaccgccgccaaaaccgctgagcaccagccgctgaccgcgttgtaagcgaccgtcttcagctaattgtgccaacaagatcggcacactggctgcactggtgttgccatgctcatcaatattgattggaaacttggcaggatctgctttcagctttttggtgactgattgcacaattctggcattggcttggtgtaagagataccaatcaacgtcatcaaccgcaacggctgcctgtgtcagcgcccgattgattgagcgtggcacttcggaaatggcgaattgataaaccgctcgcccattcattttgaaaaatggggacggcttagctgagggtgcttcggcaaacggactgtgattcgtctgttcaccagcaaccaaagccatctcagtatcgccgaaacttttaagatccacggcctgaaccgggaaaccttgatcattgatcaaaaccccgccagcaccatcagcaaacaacacggccgttcgccgatcatgccaatcgacaagccgagaaagcacctcgctgccaatcacaattccttgatgaaccgttggactcgtcatcaggcgatccgcaacatgtaatgcatattcaaagccggcacaggcaacattgatgttaaaagcaaaggcatggtctgcctgcaaggccgcctgcaaccgattagcctcagccggcgtcgcataatccggattcatggttgccacaataataaaatcaagttggtcagccgcgacctgcgctttggccaataactgctgagcaacatcgtaagctaaatcaaaatttttttgattggtgacgacatggcgcgctttaatcccagtgcgttccttgatccaatcatcggacgtatccatgtactggcgcaattgatcattctcaatccgcgtggcaggtaccgaataggcactggccagaatctccaaagcgggtccttctttctaatgacgatattcgtcaataaattcattcagattatccagtgcccgctcgatcaattcgatctgtggctcggtaaatcctttgacgaaactcgcaaccattttttgatgaaaggcaagatgggcacgatacatcaggcgacctttgcgactgagccgtaaattcacaacgcgtttatccgactcaagatgcaaccgctcgacataacctttacgcgctaaattgttgatggcaacgctcaaagtgccttgggtgacatgcagtcgtttagcaacatcgcttgaactcggtgtcgcatgaatgccgatcgcatcgatcgtatgcatttccttgatgcctaaatcgcggaactgacttttacgcagttcttcttcttccattcgtaaaatatcggtataaactctgatcaatttatcattgatccgcttgacgcttggcttttgggacataggtgtgcctccattgacaactgatttgatattcaaagtatcagttgaaaaaaatagcctgtcaagtgagctaagcattggcttctaccacgaaatgcaattctgcgtggcaaaccaattcatctccgatactggcagtcgtcgcaacgacccccatattctctcgaaccttaaccattttgatcgccagtgttagtacactgccggttggaacttgtgctgaaaaatcagctttactgatactgcctagataagctgttttgccagcaaactttggcgattttaaaatcaaaatggatgccgcttgcgctagtgtttcaataatcagtgttggcggcatcgttagttcatctggtagatagccgaccaaatgatcctccgcaacactgacatacttctcagccaccagcgattcatcaggcactaactcactcacatgatcgatataaaacaatggatatcgattcggaattaatgcctgaatggttgaggtatttaaagttgtcatagcttcgcctcctcttttcaaacgcgattgccggcctaaacgttgcctgctcacgctttctttttaaacacggtcgccagcccggaaaaaccgggccagcttttttcaaaacgcgttcgctgacccagaaatctacgtgtaaggaccctgcacgcaatggccaaagtgcggccatcacgttcaggcccacttacactccgattcctaaccgggccagcttttttcaaaacgcgttcgctgacccagaaatctacatgtaaggaccctgcacgcaatggccaaagtgcggccatcacgttcaggtccacttacactccgatttctaaccgggccagctcacgctctcaactaaactagttgaatgttcaaagcatatgcagaactgctttgattgtcaaaccttttttgcgtttattatcttttgagaatattgatgtatcagaatgaatacggtctcagataatatggttaaggggtttaagggttaccgaaaaaagcctaactatgcaaaaaaaaaatctcgacttttttctggttttcgttgtcaaaaatggcaaaataaaaaagctaaagttgagaatacacaatagcttttttacaaaattcggttgaacttaccactcattagccgatgtttgggacacggcaacacgtaaatggttttcttttagccgaagtcggacaatggtgccaacttttttgggatcgtcaatccacggttcatgtcctgccccattcacggttaacagttcaccatgttgcacgacagcggcgatttcttgaccgagttcaggattcgcaaaggtatcattcgttccccagattaacgtcattggaacagacagctcgcgcaattgcgactctttcaatgcattgtgatacttttcttgattcatcgtccgtaataaggacaaggttgccagctgatagtttggcaaatgatcaaatgcataaacacagtccgcaaagctttgcggcaaagcactgacggcagccggatcagtccccatgcgatgcagcggtccccaagcgcgtttggctgatttagggatttgacgtttcatgaaccatttaccaagacctggcatcatcgccattttgagcaatgtcggtgttttggtcataagcattcggccgggattacccagtaaaatgagctgctgaacccgatctggataggccagcgcaaaccaagtcgcccaatgcgcacccatcgaatgagcaatgatcggtgctgatttgagatcaagcttatccatgatctggctgaacaagtccacggcaaaattgtgaacatctacttgctcatgatcaaatccatcgctcaaaccgccacctgggcgcgccatgacaaaaacatgatagccgactagttgcggcaacaacggcgctagcgcatattgatcaccagtattgctgggcacaaccagcacggggtcgccatgaccaaactctaagacccgaacccgcaaatcatcaggcgcaattttaaaccagcgcgtcttaggctttaagtgaaagtcagcccagagttgattttcagcgtttcgtgccgcctgaaaagcaacagaatcatgttcaagaattggttgcgtcaaaaaagaaccccctttaaaagtggcacaacaatgtcaggtatagactcgttaccgctaacacttttatgccaacccatctgtcatggatgcttgataaatcgtttcgacatcttctaccgacaacggcacataggcgcgcgtttcaagactagcattggcaacagcagcagtcgccatggcatcaaaatgctgagtatccttgatcccaacttcaggcaaggtcatcgggaaccctaagcgactaatccaatcaaacgtcgcgtcaatagccgcttgcgccacggcataagattcatcaccttcaagatcccagacatggcgaccaaattgtgccaacatttctgatgtcgttgcgtccttggtcagaataaacgacatccaacgcggtgttaaaatgccaaggccgacaccatgggtaatgtcataataagctgatagttcatgttcaaggctatgcactgtccagccattttcgttagcaacactcacgataccgtttagcgccatcgttgcgctccacattaagttggcgcgggcatcatagttatcaggttgtttcaacgcaatgggcgcccacttaataactgtacgcatcaagccttcaatcatgcctttgctggcgtcattattttttgaacgatcaaaatattgttcaagcaaatgactaagaatatccattgatcccgccgccgtttgtctggctggcacagtaaaggtcagtgacggatccaaaaatgaaaccgctggtgtgtttggcccgactgtgccgagcttttcatgagtgacaggatttgaaatcacggaaccgctgttcatctcactgcctgtcgctgctaatgtcagaatatcgacgactggcaattgctgcaattttcggcgggttacgccacgatctttgacaagatcccatgggtcgccttcgtaaaacttggcgctggcaatgacctttgcagcatcaatcacggagccgccaccaactgccaaaacaacatcaatatcctgatccttcgccaacttttggccagcacggatagaatcgatcttcgggttcggctcaatgcccggcaattcggttaactgcaaatcagcgagcagtccagtcacggtatcgtataagcctgactttttgatggaatggccaccataaacgaacaaaacacgcgaaccaaattgactcaccgcgtcgtgcagctcaacatctaatcggcctgtaccaaaacgaatatcggttttattctgaaatcgaaaattcttcaaagttatcgctccttttttgagtgtgaacctgatcgtttcttattactttaattgtaacggttttaagggtaaaagaaacgcgaatagtggcaatttctcggatctcgttcagttgacgggtatcgatgaatccagctggtaacgtggggactcgctactttctcccaaactggtaaggaatggacgctggcatgttcctcagcacacaaaaaaagcccgacttaaacagccggactaccaacccactttttttcttagtgactcgctttaaccgcgtaaacaacccggattggagtggctcgcacgcgtaataaccgtgcggcctccacattgccatgggccgcgcggatgcataacatccgccgtgcctgctttgccactagcaatgtggggaagtttttagggaaaagtaaagcgaataactcctcattcgtcgcgccaatcaatgataagggacacctttctgcttgctgtaatttgtgcatagtgtagcatgtttctcagcaggcgccaaggggtaattgatgtttttgttattttacttactgagacttaatttaatcggcctttggcaatcaaatcagtatttaaaaaccagtgttcagccggatcgccttgcaagcggctgtaaggtagtggcgtcttcccttgtgcagcaagttgcttgttgatgtaatttcgaagaatccaaggctcttcaatttgatcaacctgcaattgcaaaaccgcttcgacatgctccggcgtggtcgcaagatcttgggcagcttgctcaagtgtgacgccagccaagttaaagttagctgccagttctttcttcgtgttgcgtcgttcaatgatggttaaagacataattttgctcccttcaaagggtcataaacgccggcaaggttattgcaaggctttcaacacttgcttcaacgtcaccgtcagtgcttctggatcaggcacgtttgccgcaaaggccttttccagtacttgaaacaaatcacgaacttgctcggcggttgtctcgccctcatcagtcaaaaacagttgccgctcacgttcgctgtgcggtgccattcgtttttccaaaagtccgcgttggatcaaacttttaatcaaattagacacgctagccggtccccgacttaattcgacactgacctgtcgttgattagcgcctggattagcggcaataaaagtaagcaccttggcttgatcgctattgagatccaaattgcttaaatgttgattcaaaaaatacttctgtagttttgcgagctgataaatcagcccggaaatgttcgattcactttgcatcatcaaaacctccatgataaacagtatacgtctttctgtttcatatgcaacagtttcatggacaccttactgctgcatcgttttattttgtaaaaatgcgtcaggtcattagcagcgccgcacgcctactcagaaaatgcatggcctgtgacggatctggaacattatccgttagttttgtccaaacaaaagtcggtcccaacgaaaagaatcccatcgttagaaccgactatttttcaatatttaattcggagaatctcagtcatcatcgtatatttcaagcctgacgactagtcatcatccccatgaattaacgtccatttgccagaatcatcgtcaaacttgctcatctgatcatggatttcatcatagcggtatttaccgtgcaaggcgccgctatctttatcgtaaacatcgacttccttcatgttagttgccggagatgtcacctcgacgcgatagtcatccaaatcaaaatcgtcataatcggccgccatttgcgcaacttcacgattgcttaaatcactgtcactgcgactctcattgtcatcgcgactatcttcggccgattcacgggcattggcgagtgattcgctggctgcttcttgagaggccgaagccgaacttgattcagccactcgtgaatctgaggcggatgcagccgcaatcgatgaagcagaggcactcgccgccgctgagctggatgaatccagtgcctcagttcgagcttgctgctggcggttttgaaagaataagaaagctgctagcaaaacaacagctgccaccaacacaatactaacaatgacccaaggacggccatgcggttgcttttgcccaccgccaccatttgatcgccgacgcgtcgcattcggcggcacagcccctgaagccagtggctgttgtcctgatggctgattggtttgcatctgaccattcacttcactactttgtcctggcgccggttgttcttgtgccaggccacccttttcagcacgatattgggcaagattaaacccgcaattatggcaaaatgcttcgtcagcgctaacttgtacgccacaatttggacaatattccataaaaaaacgcccccctcaatttctttgctgcaagctagcgcagcttttttaaatattagttggttgttgctcttggtagctgttgcagcaaccactgatacgctgccggcaacgcccgctgccaatagttaaatccatgtgtgccagtcgctgaccagctggtagtcggtgtcacccccactgcctgaagctgtgaggcaaaatgagtgacatcagtaaatggcacagttgtatcagcttgtcctgacgccaaataaactttcaaaccagcaagtcggtctgccgtcagcatgttggcaggttgatcggcatcccaacgggcctgatcccattggccatgagttaaaaaggctggcattcgtgattgggccgcttcaggtacctgctgccaaactgcaggcgacaaagccacggcgatccgaaactgttgaggttcggctagcaccagtcttagggcaccatagccgcccatcgacacgccgccaaccgcatgggcatccgcctgcgataaaagcgcaaattgttgctttaaatgtggtagtaaatcttgcatgattgccgtctgcattttttctgctggcgaatcaacgtaaaaactattgccaccatccacaaacaccaccactgctgggtgaccagtcgaattaacagcttcatcaagtaagcttttcgaatccactaactggaccagattggtgtcatcgccatccatgccgtgcagcatgagcactaatggataacgtttgtgcggatcgtagccagctggcacataggccatatatgaccaagatcgctgtaaggttggcgcggaaaaggtgaacgccgccaagctgctacttgtttgcgctgccgttgaacccgcaatagaaggagcggtctgtgacggtgtcgatgctgcttgcgtcttcctgctagactgcttagttatggctgactgccgctgacgactaacagtcgcaggcgcgtgcggctccgccgattgagaatgtcgaataaatgctcctattagcaaaaacatcaacacaccgaaaccagctaagacccatgccttaccgcgatgcacaggttaagcccccacgatataccagcaaccaagctcgccttaaccttcctttatcttttttcaagtgcctacccccaggaactgacgacagttgtgacctacttcttaatcctacaacactgacggcatttacagaacatcttttattttttgatcgaaaacaccatcagtctctcggcaacaaccgagcggtgacgaacataaccaacgccgcgccaataccgacagaaaacccgatgccgggattcagcaaaccttgaatttggttgttggcactgctcatcaacggcgcataggcaaaatataaggccccgtagcctaacaaacctaacatgccagcaaaccgcatcatcccgcgtgaccgaaaaagtccgaacaaaaggcctaacactgggcctatccccgctaaaataagcgctaagtatggcagattggtttgaggcgaagcaacgccagtattggttgcagcagtttccgccaaggtgacagcactgcggacaagatcatacaaactgccgccaacattggccgtggcgacactgccagcaccaaatggccaggcataggccgctgtaaatgccactagcgacgcgattaaataaaccagccaaatgatgccgcctcttcgtctcggttggcctgctgtggttccaaggtgcgaccaccaatgcggcgaacgattgctcattttctgtgcttgctgcgccatcgggccattgtccggctgcgtcatatacggattaggatacggtggcaccgattgacccgctgctggccgcggcgctgtccaaatatcatcatctgagtcgcctgaatcgtcatcgttaaagcgactagtataagacgccactggtcggcgatttgcaacaacataaatggcgacagcacagccaactgccaacacccatccagcgatcgttgaaaaactaaagacacaaaaaagtaccatgactccgatcaaggtatacaccatgtgagttgccaaccaatcgataaaatgatcgaaactatcgtcagttaggaccagactctttttgatgctggttgaaccactttgccgctgtcggcgtgagcgttctcctcgtacctgttcacgaaccggttcagatgcagctggttgttgtgactgctcacgaccaaagtccgtctcaccagcaacccgagcattgaagattgtcaaatctgcgccgcaattcggacagaatttggttccagccggtattttgaaaccacaatttggacaataacgcatcgtctctgccaagctagttccctccattttcatgctattagattcatcttgcatggttcgcggctaatagtaaagtttcggcgaagttttttaacgaaaactcacttagttgtcagtattggccaactgtttagcaaagatgcgcgattggatcatggaaaaagccgcagactaaaaattctttgtcgttccaaatgccacaacctctggtcagagagggctagcgacgcggagctggcgcggcgacggtgcttcgagccgcctcatctagccgtcgactactctgccttggcactgtaatctttaaatctctccaaaatatccgcgagaaaacaaaagacgactgatttccctatgaattgcggaaaatcaaccgtctatattgacagctgtcaattaaatcgcagcctgtccattcaagtcactatttagaatcgatggtcaaagcctcgtggaccgccgccgaagccacctgggtagccgcgacgtgggccatgctcgtgatgaccgtgatggaaccgtgcggcccattcgcgcatatcatcgaactgtttgccttctggccagctaaggtcatccctagttgccaaatcggcagacaatttttcaatcaacgtcagtaattgcgcctgctcttcttcggacaaaccactgaaaatttgatcaggtaaatccgtcttcagtttacccgtcgtttcaataaattttttaccgtcatcagtgagcgcaattagctgaacgcgcttatcggtttcggactcgcggcggctgatcaaccctaaatcctctagtttctgaactaaagcggaaaccgaacttggccgaatgtccaacgcctcaaccaaatctgaattcgtcagttcgcctttattatcaagcagccgcaagagtcttaattgatttggctggcgctgtcgatcaccaaaacgcaagctgctagccacggcacccatgaatggacgcttttgaattaagccgccaaaggccttcaataaatcttctgatgtttttgtcatcgctattctccttgtcttttagtcagtctactatcccacgaactaatagaattagtataattcgttagttagtttttgtcaagactacctacttttaacgtttacgcggcctttccgaactgatctttaacatactcgcgataaattggatgcgacttgatcaggtcctcatgtgtgccgctgccgctcaccgtgccattttcaatgaagtagatccgattagcattcatgatcgtgctgagtcgatgggcaatcacaatcgttgtacgaccatgcattaatttagttaatgctttttgaaccatcatttctgattcggcatcaagactagcggttgcttcatcgagcattaaaatcttgggatcgcgaagaaaggcgcgggcaatggcgagtcgctgtcgctgaccgccggaaaccttgaccccacgttcgccgacttcagtatcgagtccctgcggcatggcctcaacaaagatttttgcgtacgccatatcaagcacatgccataattcttcatctgtatagttgcgcgtcgccccatacgtcaagttataacgaatggtacctgccataattgttgcatcttgcccaaccagcccaatctgctcacgccaatcttcaacattcagatttgcgatgtcctgatccccgatcaaaatgtggccgctatcaggcgagtagaagcgttctaaaagactgataatcgttgatttgccgccaccagacggaccggcaaaggcaatgacctgattaggtgccgctgtcaccgtgacatcttttagcaccggcgtctcctgatcataactaaaactgacatgcgacattgtcaaagcttgaccactggcatcttttagcgggcgacctgtgcgactttcctcaggttgttgcagtaactcatcaatccgcgccgttgaaccgctcgctttcgctgtctccgcaaaaaactgtccaagcgttgaaaaaggcccaatcaactgggtgagatacattaagaaagcaaacaaggttcccatattcattgacccacttgcaacccgactggcaccatatgcgagcacgcccacaatcatacccatcattaatgtcgtcattactggctgggcaaccgcgtcataaactgcttccttcaagcccaagcgatacaaacgatcaatgcgggcatcaccggttttcttttcgactgcttcagcattggaacttttgaccaagcgcacagcgcccaacacatccccagcctcgccactaaaagctgccagattctcttgtcgtgaaaaagcaatcttacgcgactgagtggcaactggcaggaagatcagaataacaagcggcacaacagcaaacataatcgccgtcattttccaatccatcatcaacatcaaaatcagcgcaccgatcagttgcatcaaggctgtgaccatgcgcggtaccgagttggcgagtaaatccttgacttgagtagaatcatttaccagtcgcgacgtgatttcgccagacttggtggtgtcgaaataactgactggtaataccaaaagcttggcccacagcttattgcgtaatttggcaacgacatcatcgccaaaaaagcctaacacggcacctgaaccagcactgatcaacgctgaaccaataaacagcccgacaacgccaatcaccaaattcatgttgaccgcatgccccaacgcattaatcagcgacttggcaatggttggcacaattaattggccggccgtcgccactaatcccaaaagcagcccaagaccaagctgccagtaatgtgggtgaatggtactgattagtttcatgaaactacggaaatcgaacttttttggtgttgactgccttttttcggctgccatcatcgtggttgaacgttgcatatgcatgtgcctccagttatcagctatttaaaatagttagttgcttatatatctaactaacattgtgctagcctaatccttttgttagtctatgtcaacaacaactaacaaaaagaactgaacaaattttgtccagttcttaaatcaccttgaatttccatgtcctcggctagtgcgcttgcaaatatgcctgaacgaaactaatcatgtcgcgcgactgttgattaaacaatggcggcagttgatcaaagtcaaagtattgcaaggccaacgtttctttgggatccgcttcagccaaactgccgccgactggtttgacgagataaaaacggcagatgatttgggcctgatcaccattgggataagttgtaaatccttggtcgaaagtatgcagtgccttgactggttccaccagtaaaccggcatcctcttccatctctcgttgcaaggtttcgacaaaggtctcaccgtactccatcatcccacctggcaagctccagttaccggcatctgtccgtttttgcagtaacaattgtccctgctcgttcaccaccgcaccggcaacggcgtttaaaaaaatcggcatgtgtccgactttgctgcgaatctctcgaatataatttgccacttaactgcctcttttctcgaatcggttaatctgattatcaagcagtcagccaattggcgcaactagctgcaagacaattcgaacactttgtctagacgctggtatgcttaaaacaataagctcacggtaaatggtccaatcaaacaaccccaaccaaatttgaccgcaaacaaatagacgaccatcctcgcaactaaaagtcgcaatgacagccgtctttttcaatcacttaagcaattgatttttggattagtccagcttgctcttactgttgacgttcaacttttcgtcgaagtcataaacaacaggttcgccagtcgccatttccaagttcatgatgtctgcatcggaaatgttttcgatgtacttggtcaaggcgcgcagtgagttaccgtgggcagcgatgataacattcttgccagccaacagatctggtgcaatatgatcttcccagaatgggataacccgttcgagggtcactttcaggttttcgccgccaggaatgatccgtgggtcaagatcagcgtaacgacgatccttagcagctgaaccttcgtcagttgctttcaacaatggtggcaaaacgtcatacgaacgacgccagatgtgaacttgatcggcaccgtatttatcagcggtttccttcttgttcaagccttgcaaagcgccatagtgacgttcgttcaggcgccatgtcttcatttctggaatccaaagttgatcggattcttccaagacgtaatgcagggtcttgatcgcgcgggtcaaaactgaggtgtaagcctgatcgaattcaagaccagcttgcttaaccaattggccagcatgctttgcttcttcgacacccttttcactcagatcaacatccacccagccggtaaattggttggacaaattccattcactttgcccgtgacggatcaatactaatttcgccatatcagagaatacctcgcttttatgatttgacagtcttctgcctgtttacagaatctcatgttacaccattttcagtaagttcgcacccgctttctctggtatattggaaagggattgttgccaaaagaacatacgacgcaaattaactgcggcttgatttgcttttggcaacttttagcacgcatcacaatcataattgtcaccttttactgaaaatatttctggaggttcatgtgaaaaaaatttggctatcaattgctggcgtttggctcatcagcgtcatttactttatcgtctatctgacagttcccgccatgcaggttgcggttaatgcaagcggcctgttgtcattggttcatggtgtcatggatctaatcttacttggcggtgcgtttgccttaatcgcaggcgcgttatatcgaatatttcatcgtcgttaatgataaagacagttttttgttatactctttttgtacaactttaatttcattctttatattcagcactcatacatatctttggagggaacactatgtttaagatttgtccaaattgtggtgcgcataatactgccaccgctaaattttgtacccgatgcggcaccagtttagccggtgtcgttgcaacagccgaaacggcggttcaaagtgcacaaccgacttctgagaatgaagcctcaaccgccaacacagcagctgttagcgaacaatcttcagtgccaagcagtctaacttcatcgtcagctcagaatcaacctgtaacgccgcaacaagcgcaaagtcaggtcacaccgcctgacaacagtcagcagcaagtgccaccacaaccagctggcacacagacacaaagtcagcaaacggctcaaggaccagcaccgacagcgcagccttaccagcaggctgatcaaacgcagcaacaagcacaaacaccgccagaggagccaaatcccacggtggaggctaccaaaaagtatgctggcagttactggcgctatctagtcgacagcattaaacatcctgcgactgtgacgcgaccatatcaccagtattttgggctaaccagtttagccatcacgattgttagtttggcattaaccattgccttgatgactggttccgcagtgtcgtcattgccaggcgcaattgctagtaatgtcttgatgaccttcctaaaattagtctttctagtggcggtcctgatgattgcggtggtcgccgtctattacttagtcgtcaacggcatgcttggcgatcggcgtcgatcttttctgacatttaccaccgagtatgcctttcactgcaactggatggtctttttctcagtgttcacgctgctcatgcaaatgcttggtatgattaacatcggttcaatcttcctgatttggttgctgctatcgctgggcagcgggttattcgtcatctctggcacgtatatgttgttcaccgctcagtcaaccaaccgttttgataaaatctacgcctatctaatcgttggtattttactagtcatcgtgttcttgatcatcatgacgttcggcctttcaagtattctcggcggcattggtcaaggtatcaatgattttggccgcagctttaacttttagacaagtatctactgcctaatccaacggctttttagacaaaaataggccttaagacctgacacatgggtagtgtcgtgatcttaaggcctatttttttggtcgtcactcaattgaccaatgcctctaggttttgtgcaagactcacggtatcagttgacattgtatgattgccaaacaagaccacaccgcttttcgcatcggctcgaaaataggctaaggtgctgaaactttccggattgtcgttgtacattccctgtaataaccgctggtcgtctaaccacatcacgccactggcatatggattaccatccccataattggcgttaatcagctgatgatagacttttaacggcatgattttcccagtctctgccgcaatgatgactttagccaagtccgttgcgctcatatacacactgccgctgcccaacaaagtcgacaacagggcgttgctcagctcatctggttgataatcgttatcaccggctgttaagtagccctgcgcaacaggcatctgcgccgtcagcgccgtaaagttatgggtgtgcgtcagttgtagcggggtgatgatcgtttgttgtaagacattcgcaaaacttttacccgtaacttgacgcacaatccccgctagcactgcatagttagcattagcataaatgaagctgtggtcgccagtcgatcccatctgctcgaatgtccagtccaaaatagcctgctccgaggttaaggtttgatcaggcgttagttcgtccatttgaataccagaacggtgatccaataactgacgaatcgagatgtccttactatgatcaattttcgggaaaaactcggccagtttggtattaaatgacagtttgtgttcggcaatcaaatgaccgatcaccagtgccgttaagtatttttcaaccgacgccaaaggaaacattgtctcgccgttattggcttcatgttgaccatgatccgcgtcaccgacgccgccagtataaacaatctgcccgtttttgatcaaagccacactacccgtgaacgccgttttcttaatcaaggcttgggcatgtttgccgacttgcgcttgcggcaccggacgcgccacaattttactagcttggcgttgatgatacacccacgccatcgttaagcccgttgcagccaccaacgctaccgccaatacaatcacaatcagccaacggtgtttatgcatcgtcatcgtgctccttgggctgcggcacactcgcgtatgttgattgcttgtgcgccgtaccagcaattttcttaacgcccaatacatctaggaaaaaggtaaagatcggaatgccgacaatcaatccccaagtgccaaataaccgctctgccactaacaaaacgacaaaggtaaagaaaactggcagctgtgttcggctgctcatgaacttcggattcaagacataagcttctagcacatgaatagctgcaatcatgatcaaaatggtgaggacatcttgccaaccgccgacggtataaccaataatcgtgagcggaatcaaggaaataatcgctccggcaactgggatcaaggaaagtaaaaagaccataatcgcgagactaggggtgttcggcatttttaagaatagtagtgtaatcgttgtgatcacggtattcacaactgcaataaaaatttgtgcttccatcacaacgccaaaagtattgataaacttcatcgcgaaatattgcagatctttgaaataccagccgaacggtgaatccagaaacagttggccaaacgcaggcaagctgtcaagctcaatcgtgaaaaagaaactaagaatgaaagagacaaacagtgtcaatcccatggcgccgatattgccggcgtattgtagcaccgtggtcacgccagtcttaagttgttccgtcaagttgagactcttcgtgctttgcagcacccattgcatgacctgattgttggcgaacgcctcactgttataaaagttttgcacagaattaaacaagccaatcgtctgatgaataatcgctggcacgtaatgcactgcagcgtagactaggcctaggatcacaagtatgtaaactggcaccacaatcacaaatgggcgaatatgaacatgccgctgaacagcgtggactaagcggctgactaggaacgcgaaaatgaaggtcaacaaaatatcgctcataatgctgcgagcaaaccacaacaagagaaagactgaaaacaagaccactgtgcgcctaaccggaagattattgatgaacttttcgtaacctgacatacttttccccacattcttaacgagatacactaagcctgccgcaaaatcaaaaaaagcgcaagcattcgctcgcgcttgccgaaattataagaaaaccttcaagtgttgcttcgttgcctttttaactgactgaagctggccttgaataataatgcgatccacttcgccttcagttggcgatgcacacgtcaccattgtaatcagtttcttaccggcaacatcatcaatccactgaacttgggtttcattaacaacctgtttactggtcactttatacgagtaaactttcttcatatcggtgatataaatgatgtcgtcttgcttcacatttttgagcggtgaaaacaaaataccttgattggtcatgtagtgaccagctaaagcgtaattaccttcgcccattttttgatcggctttcatcgtgcctgcccctgcactgagattctcgtttgataaccctttaaaaataggcaatttcaaaccgacactgcgaatggcaactttgccaataggatgcaggtcacggttaagcgcggcattgccaactgtattgatatcaagcgctttgacccctttgaaatcaaaggttgctttgcgtttttcatttttgttgacattgtcacggtcaacttgtgccatcgtccactggctaagatgatcgaccacaaataatttaatgggttcattgaagatcagcgctaatcccagaaggataccgagcgtaaaaatggttcgccaaagccaacgatgtttacgcggtggctgttttttattagattgtgtcatcgtcatcctcctcggggaaatcataccttgaaacgttgtgagattcaagcaagggtgctcgggtgaatggctcaattgcggtttgttattttgataaataagttgtttttctgttctgctgtcgttggaaggttatccttagtgtccgagctggctacgcggcgattcggggtggcgaccgcgaagctagagtggtgggcacgacttcgagcccacgcgcaaaacccgcgcgcagtctcgaagctcggcctccttgtaggcggtaaaccgccaacaaggatttcaccactgagcccatcgccgctccgccagctctccagattctattttaattttaaaacggtattctgatctactcatgcaagaacgacccacaattgaagttctacatgccccacctgccatggtatactattgaaagtttgcataggaggcgcctgttttgaagaagctttttcaactctataagcgttatgaaatgatcatcaattacctgtttatcggcggtttgaccacgttgattaactttgtcacgttcttcgccatgcggtattttggtattggcttagttttgaccaatacaacggcgaatatcgtcagtgtcatttttgctttttttgccaacaaaagtgtcgttttccacagtgactactcaagcaagaaaaagttctggttcgagttaatcagctttcttgtgttgcgtggggtctccttgttgctggataacttgatcatgatcatcggggtcgattggctgcatagtaatgagattctcgtcaaaattttagatcaggtcatcatcgtgatcgccaattatctcttctcaaaattgattttcttacgcaaaaaataacttcatgaagtgtgctgacccctgtctttgttgcaggcggctagcacgcttttttaagttggcagcaaaaatagttgcttggtttggtgcagtgtcacctgaatcggggttgaatattcttcgccgtcaatttgaattggtacagtcgctgatgtggcaaattcaaatgtttgcccttgtgaatggtgcatggcgcggtgaactgaacggccactgagaatggcaaataggacctgaagcaaaatgcccaatttttcgcgatgcacctggacaaaagacaaggtgttgcgattatctgccttatcaggaaacagtcgcaaaccgccgcctaagaatggatgattagtaaagacattgagataagcattgtcgattgccgtggttttaccgtctacttgccaagtcgcacgaaactttttttgttgtcgcagtgcttttagaatactggcagcatacgaaaaatgaccgagttttagggcattcaatgctgccttgtgatcagaatggttcgtttggtaaacgatttgggcatccattccaataccaaagttattaataaaatactgagtcccgtacttggccgagtctgccaccccgattttcaaggcatgcggcattgccgttgtcaaagccgccgcagcttttttcgggtccagaggaatatggttggcgcgggcaaaatcatcgccggtcccggttggcacatagccaatggcgacttctggatgaccttgtcgctgcaacccattcacaacatcgtgtagcgtcccatcaccaccaatcacgatcagttgaagatcgtccatcttgtgttgataagccttgatgagtcgttcggtcaccaacctggcatcaccagccttgcgcgtctgactaatatgcagtggcgcaaagtgagactcaatgattgcaactaactcaggtaattgctttttccagcgggcattccccgcactgggattcataatcacttcagcaaaaggcattttccttactccgtctcattagataattggtcaaaaagcgatgatattctttatcagcgatgaccacttttatcatatgatacctttttcaaggcagctagacacgtattgcgcttgaaaaatcacctttctcaatcgccggcaacacagcgactaaaaacagcacggccatcgccgtactgcttaatactcatctttcttctatcaccagttacgccacaggcaccttgtgtgtcttcaagaattcactcagcggtaccaatctttccgcgtagtaacgcttcttgaacgcagcaatcgtgtctgcgtcaaactggttaggatccaattgcagatgctcaactggaattggccgttcgttggtgattttggcatcaatcaaggttggtttgccggcagcccggttgtcttcggctgtttcgaaagccgctggtaattcgtcaacttgggtgacagtaatgccggtcatacccatgcctttcgcaaccgtcgcaaagtcaatcgccggcatgtcgatcccgaaccactcgtgaccatcgtcctcctgctcatcttcaatgtaccctagcgcattatttgaaaagaccacattgatgattggcaaatgataacggacttcggtatccaagtcctgcatcaccatcgccgcggcaccatccccagccaggttaaagacctgtcgctttgggaagctcaattgaccggctaatgcggccggcaatccagcgcccatcgtggcaaacaacccactggtggtccacgcttggcgcccattgactttcagtaaccggacagcattttgggtaacatccccgacatcaatcgcaaaaatggcatcatcagtagcaatgcggttaatttggccgaaaactggttcgaagcgcattttcccggttgtccgggtcatcatatcgtcattatactgatgccaatttttcacgttgtcgacattggcttgataccagccgctgcgtggtgcatcgtcactacgatcaatcattttcttcaaggttgccggagcatccgccaaaatggcaacatctgtgtgatggcgcttgcccaatgtcttcgaatctgcctcgatctgaataaacttggcgttcggtgagaacatgacttcagcaaacgggtaattcgaaccgacaaacatgatcaagtcagcaactcgcaacgcttcattcgctggttttgaagccacccgagctgcagaaccaagcagtgattcaaattcgtaagggataatcggcttgccaagtgctgtcgtaatgactggcatctgtagctttctggccagcgtcatcaccgtatcagcagccccacggacgccttggccaacgtacatcacgggccgttgcgctgcgccaattaagcgcaacgccgcatctacttgctcgtcgctgccagctggtaaaactggggtggcgtgggtagctgctgcactgtagtagccatcggctggaatttcttcggctgccaaatcattgggaatcacaacaatcgcagctccacggccggcataagcacggcgaatagcctcgtcaataatatgcggcagactagccgccgtggtaaccgtccgcgcatacaaagcggcatcttgaaacatcggatcttcatccagctcttggaagaaatcgtaattcatgaagcgttgttcaacttgacccacaagaaataacgtcggcaccttatccattttagcgtcatacgccccttgaaatagatgggttgcgccgggtcccgctgatccaaatgccacgccaatatgcccagtcaatttaccatccgctactgcagctagcgcaccgacctcttcatgtcggacgtgaatatactttaaattgtctttctcttcatccagcgcatacatcatattgttaaaagtaccgccggggattccgtaaacatgtgtcacaccccagctctcaagtgtcttcaacgcggcgacaccagccttaatggtctttaccataagaatccctcccaaaaagtgagcgcgaacaggcacgtttagaagtcggcacatatgtgggcttctgcgacgacgagcgcgttattcaatatctctcgcggttatactagatttgttttaggcataaagcaattattttgttcagagcacgaggtgaggttgggacatcattcacagccaacaacaaggcgacaatttccatacaaagctgaaatagttggccttattctcatggatcaattttattgagatttaaagataccagtgccaaggcggagcaatcgtaggccagatggggctcagccgtgcaaacaacacagcgaccgggtttcgtcgctgatgttgttaggcgacttcgagaccgggctttgggttcgaagcgccgtcacgctctagctccgcgtcgcaagccacatctggccggagattgcggagtttggcacggcaaagaatgttagtcctaagcttccgctcgattagccgtcatcatctaaaccgcccaatcgcataacaaaaaaacggcgaaccccccatatcaaggaaagcattcgccgtcatcaaacttatttcaaatcttcaatactattaatattcttcatatacttcggcactgccaagccgacctttgcaccatctaagttcacgccaagatcaacaacttgattcttataatcagaataaagttttgctgacgtattcggtaaccaagcagaaacctgagcatcggcagctttagttgcaactgaagcccaaactggttgtggttccattgcccgaatcgtcacgttataccctatttgccgcaaaacagttgcaacaacattggtggatgcgatttccgaatcccacgcaatataggtcatcgtcagtttaggtttgccgctaacatgcgtcacacccttggtccactgtgcgatttgttctgggtgcttcttaacgaaagctttggctgcctcggcaggatccttgccgccgttgaccgccagcatcacactggacatttcttcaggcgtccagtggaactgatctaatacctgataagcttgcggtgcatcctgcttaaggcccttccgcacgattgtatgaatctgttcggttttgccgtaaacatttttaggatccttgagaaactttagtggaaacttggtgaacatccagtgcggcgtccagccagtgaccacaatcggacgtttgtcggcaatcgccttttgcaacgtactggtcatagcggcggtggaacttggttgcaactgccactttttatccacaagaccataagctttcagcgctttgtctgtactggtcatgaccccagcgccagcatcaatcccagtaatggtgtaattgatttgcggtcccagcggctctttagcgtcatacttaggctgtgtgctgctgcaggcggcaagtgcaccgactgtgatcaacaccgctagcgccgcggcaatctttttcaaaaaagtcaaacggccacctcctaacgactacgattgagactttgcgtgatccggtcaagaatgatggccaaaatcacgatggcaagcccggcgacaaaaccgccgccagcatcattacggccgactgcaaagtaaaccttcgtacctaagcccatcgcaccaatcatcgaagcaataacaaccattgacagggccaacatcatactttggttgatcccgaccataatggttccgcgggcaaacggtaactgcaccttcaacaattgttgccaaccagttgccccaaatgcgaccgctgcttcatttaaatcagctggtacttgcgtaatgccaagctgcgtcatacgaactgtcggtggcatcgcgaagataaccgaggctacaaccccgggtaccatcccgataccaaagaaagcaacggctggaatcaggtaaacaaaggccggcatcgtctgcatgaagtccatcaatggtttcaccactgcggaaactgacttgctttcggccgcccaaattcccagcggaaccccgatgacaatcgctaacaaacttgcggtcaacactaaggttaacgtttgggtcatgtcacgccagaaaccaaggttccaaatcaacagtaaaccaagcaattcaaaaatcagtaagctgcgatatttctggtcgcgtttcagataccaagttaacgcaagtactagaatgatgaataaccagatgggaataaaatcaaagacagcttggaaagcattcacaatgccgccgatgaagttcgttaaaaccccgaagaagccggaaaactgggttaaccacgcaacaaatgaatcgacccagtgggccaatggtaatgtgggaatgctgattaaaatgttagacattgacattgacctcctgtccagataatgcacctaagacggcaccgcgaatgatgatcccgcgtaagcgatcatgatcgtctaccactgcaaatggtaccggtgtagtggaaacggcgtctagtaagtctgccaacggcgtatccattttagtcgttggcacatcggacttaacaattgagcgcagatccttttgaccggcatcaatagctgaccgcacgtcgtcggcgtccaaaatgccgacgagtttacgtttagtatccacaacatacaaacttgaaatttcattgtcccgcatccgccgggcagccaaacgaggaccatctctatcaatattgactgtgttggcccgaatcatcacattggcagccgtataaacctggctgcgatcaacaccttcaatgaatttctcaacataatcgtcagcaggctggctcaaaatttcttcaggcgtgccaatctgaacgatttcgccatctttcataatcataatgtgatcgccaattcggagcgcttcgttgaggtcatgcgaaatgaagacaatggttttttgcatatcttcttgcaagtccaataattcatcttgcatatcgcgacgattcagcggatcaagtgctgaaaaagcttcgtccatcagcagaatttcggcatcgctagccagcgcgcgggctaaaccaacacgttgctgcatcccaccagacaactgatctggatattgatcggcaaaaccatttaagccaaccaaatcgagtgctttgttggctttcatctcgcgttcatctttctccatcccttgaatctcaagtccaaaggcagcattttgcagaacggtccgattcggcagtaaggcaaagccttggaaaaccatgctgagcttttgccgtctaacttcacgcaatgcttgcttatcaagtttggcaatgtcatcaccgtcaatcagtacttgcccgtctgtcggttcaatcaaccggttcagcatccgcaaggtcgttgatttaccagaaccggaaagtcccataatcacaaaaatctcaccggttttaatcgaaaaatcagcacgatcaacaccaaccgttgcgccggttgcttttaaaatttcaggcttggtcttgccggccttcaacatttctttcgcgcgattcacgcgcttaccgaaaatcttggttagcccgcgaacctcaatttttgtctcggcattactttcaactttgtgttgcatctactcactccttgttttgaaaaacgtttgtcatcgaattgaaacaatgctatccattctagagatagtttgtgtgtgattcaaatcacggaatctcattttcattttcgccgccattaagcgccacatgacgttctgtaattgatgcgcacaaaaaaagcccgtatccgcatgaggttatgggctagggacaatcagcgattcgaattttgagagcttctctgaaagtcaaggatagatgaaatttagatgggatctttttcattattcacaagctgttaagattaatctctgaaaaaggcaagtgttcgtcgaatggtatttcgttgcctaatgtgatttgatctgggccagtcatggtgtcataagccagcacgcgaacgccattttgtttagcagtcgtgatggcagtcactagttcaggaaaacggtcccgataaatggtcatttggcgaatatccggtaattgcacgatgaacaataaaaatgcctgatacccttctgcctgcgccatcgtcagcgtatgaacatgcttgacggcgcgagttgttggcgcatctgggaaagctgctagggtgccattagccaacgtgacgcccttcgtttcaacaaaccacgactggccatcagcggctttcccagcaaagtccagtcgcgaatcgcgccaagtcgattctggatgaatggcgtatggcaaggcgagtcccggcaattttaaggtgccagcttccaaacattctttggtaacatgattgggtgccagactgtcgatgttgatccagcgaccttgccgttgaacagccagcaagtcatagtgcgttttgcgatttgggttatcaacatagcggacactggctaatgatcccggaatcaaaatttctttattgcgtccggtattattcatgtggacaggttcgacggtgccattcaggtcaatttcaacggtaaagcgactcacccgtttgatgagctgcccgacgctgacattttggtagtacatgcgttacttccttcccttgttgggtgttggccgccatgaaaatagcagtcgcaacgatccatgaagaatcggtacgactgctcatttttgctgcacttgaccgaaatcagcgaacgataatcaccgagaccgatgcatcgcgagcaacttcgctcgcaacatgaccaagacgtaaccgaccgcggcgaacatgggaacccataatcaccaaatccggtttgaaggctgggatcacttcgtcaagaatggcagctgctggccgcccttctgcaacgatcggttgtgcgttttgaacgccaaatgccgttgctttttcgacgtaagtgtacagatccttagccagtgtttcccgggccgcatcaacatcatcaggtgtcaatgattggaaaatattgaggtcgccggtttcaagtaccgacacgatccccaacggaatgtcataaatcttggcaaccgtgcaggcgtagttcaatgccttgcgcgaggagtcgtcatcatcatcatcaaccgccaataacaaccggttataatgcatggattcaatcgtcaaatcatcttcagtaaccaaaagaaatgcccccttgcaagtttaggtatccctaacaatgccattttatcacatgtcgcccttattttccgcaaaatactgcttaaaccgaccaacataattatggaacatatatttcatcaataaccagcgcttgaatgtcatgtccggtttataaaagaccgtcgtaccatagcgtttctctttaagtaactgcaaggcttcctttttagcttcgttatctgcagaatactgcttgaaaacacgctctggaacccctagccacaatttatacttgctgtggtcatcattaccataaaccgttggcgcgtccttcaaatctcccacgatgtaatcgcgaacaggccagctggcaagattatacccatttaaagtgacgaaaaagctactccggccttgacgaatattaatttcaaacagcttgaacgtcttgtcacgatgatcatacttcatatcaaagttagcaaaaccggtgaacttaattgcttcgaggaattttttgatctgatcgtacaaatcctgatcgaaagctggcatgatcgcgacatagttaccgattgaagaaggcgtaggatcctcaagtagcggatgacctaagcacatcattttaacgtgatgatattgatcaacataacagttcaaagtccgcatgttactgtcatcacctggtacaaagtcctgcaagatgagatcagacgtatagccgttatcatagattttggcaatcgtattcgtcagttcaacttgcgagtgaatcgtaaacgcctttttgcggccttcaaagcgaatgttcaaccattcaacggaatcagtcggcttgagtgctactggaaattcaaacggtgccgtgatggttgcgttgctttcatacatcgacttggtgacgattttggttgccggatatggcaaatgatactcttcgcagacttgatagaagctctccttactattcaggcgcttcaacaattcataatcaacatatgggcagatgaaccactggctcaactcatccttatgtttggaaacaagttgggcataggtgtccccgcaagcgattaacaacagtttgcctggagcatctgcatgtaccttggctacctgccgcatattttcaataaaagtcggatcggaatcaaaatgctcgatcagatggacattcacgatccgcgaaaaacgcgttggagcaagttgttcgcgcgcataaacatcaatcgccccaccgatcatctcgtggaacgaacgcgccataccatacacattcatgtcactgccaagcaggatgggggtaaaactgggtgcatctttcatctgaatgataatctcctcgttcaataagacgcgaattcggtcaactgtgcgtcttgaaattttcattttaaaaccttgtctgccgattcaattattgacatcaggcatcgttagactcgttttgtaagacgcgaaggtgattttatcaatcagcttccgtccgttgcccccgaattataccataatgccccaccacgttcacttgcgtcaggataccataacactttttcaataatcatgaatcaaaaaatactaggtcatggctacctagtattttctgaaactcactcaaactgttcaacttgtacgccttgttgactcggcgccaccacctgtacttgccactttttccaactttcttgagcttgcgcctgtacctgcgcggcagccgcagatgagtctgtgatcgccagcatggtcgaaccagaaccagaaatcaaaagaacaccgccggccgtctgcaccacttgatgagccgctgaatagtctggtattaattccgcgcggtaaggctcctgcatccgatcagtcgcaacttggcgtaataacgacatgtcgccatcagccagtgcccgggtcatcaaggtacaacggcccatttgataggtagcatctgcataagtcatggttcgcggtaaaattcggcgggcatcagcggtactgacagcatagtcagggatcaaggtcacaaaatgcaactttgagctgaccgtatactgccgaacgactggttcattttgcgccatgatcgtggcacatagctgcccgtaaatcgctggtgccgcattatctggatggccttccatttcagtagcaaatcgcagcagcgccgtatcatcccaaccggcttgataccacgcattagcagcggcgataccaccaaccacacatattgctgaactgcccaaaccgcgggcactcggcaccgctgaatcaaccacaatccgcagattaggaacaggctgatcaatcgcctcggcaaatttgctaaacgcctgataaatcaagttctcactattggcgaaagctgggtcatcgccaatgatctcaagcttttgggtgctcatttcaaacgtaaaatgagctttgagatctaaggcaagtcccagcacatcaaagccaaccgctaagttagcgctcgttgccggaacggacacgctgatcatcgttgaatacctccttcgccgccccaataatagcttgacccatatcggttggtgccacaacaatcttttcctgcggtcttagctgttgaaggcgagcaagattcggcggaatcgtcacaccgctaacctgttgcaacatttgcatcgcagcaaagtcatcatccggtacgtgcgattgtagtgccttggccaccacgcgtgaaaatttataagggcttgcggtggctaaaagcacattcggggtgttatccccagacgccgcccggtactgctgttgaaccgcataaccaacagcagtgtgcggatccagcaaatacccatcccgatgccaaacctcgcgaatggcatctgccacctcttcatcaacagcaaaaccgccagcaaagtccacttgaatcgcggtcaacacatccggccgaacttgatagcgaccagtcgtctcaagttcctgcattaaatgcgcaacatacgcgctatcttcgccactcttataatacaacaggcgttccagattactggaaatttgaatatccatgctaggtgccactgttttcaaaaacggtcggttgcgatcatacacaccggttgccagaaaatcagccaattcgctgttggcattggcggccgcgattagtttatgaacaggcaagcctagactcttagcatagtagcccgccaacacatcgccaaaattcccggttggaacagtgaaattaacctcatctcccattgaaatggcctgtgttttaaccagttggctatacgctgcaaaataatacacaacttgcggaatcagtcggccaatgttgatggaattggctgctgacagggttacttgctctgcctgcaaccgagcagcaaagctagtgtcagtgaacaaggttttcactgcgctttgggcctgatcaaaattgccagcaattgggaaaactcgcgtattgtcactgcccacggtcaacatttggcgctcctgaattggactgacaccatgattaggatagaaaaccgtgatcccagtctgcgcgacatctttaaacccttgtagagccgccgttcccgtatcaccgctggttgccgctaaaatcatgacccgatcatcaggatcaagtgccaactgcatcaagcgcggaagcaactgcaagccgacatccttaaaggcactggttggtccatgaaataactctaaaacatgaaaatccccgacagaacgaactggcgtgatgcgatcatcggaaaaatgctgatgataggcaaaatgaatcgctttttttagtgagtcggtgttaaaatcaggcaacaggatcatgagaactcgctgagcaatcgtttcataatctaaatctaacagttcatgaatgttcagcgtctgatcggccaaatgcggcaggacaaacaaaccgccttcttcagaaataccttgtttgattgcctctttgctggttttgctaacctgatgatcccgtgtgctcgtatatcgcatttgaagaactcctatctcattcggcttgaattaacgatatggatatgataatctgttcgcattagaaaaacaagtgtctatattttataaacaaggagctgagaatttatgaaaattgccatcttaggttttgggactgtcggcagcggcgtttacgatattattgcaaatggtgatacccgaatgcgcgtcaccgctattttcattcggccaacgcaccctgcgaccatgcctgagatgacaacagaccttgacgccatcttaaacgatcctactattgatgtgatcgttgaaacaatgggcggtcttcatccagcacatgattatattttacaggctttgcagcacgataagcacgtggttaccgctaataaagccgttgtcgctaaatatttgccggagtttaccgctgttgctgcccagcatcacgtgcaattttacttcgaagccactactggcggcggcatcccgtggattcgcaaccttgaacgcgccgcacgcattgatcagatcgataccatcgaaggcattttcaatggcactagcaattatattctcgatcagatgcaacgcgcccacctcgattttgaccccgttctcctagccgctaaagatatgggctatgccgaagccgatcccagtgctgatattgatggcgaggatgtggtcaacaagctgaaaatttcggcagcacttgcctacaacatggccccaccacgtgatgtcccaacttttggtattcgcaacgttagcaaagccgacattgactttttcgcaagtcaacatcaggttttacggttgattggtaaaagtaaacgtgacggtgaccactatagtatggtcgtggaaccgcgcttgtattcagaaaccgccttggcggccaatacatttgaaaacttcaatctaattcgcctgcatggacaaacgattggcgacctgcaattttatggtcaaggcgctggaaaatacccgacagccaacgctatcgtgcaagatctgtacgatatccttgaaaatgccccgcatctggaccgtagcttcgatcagccgctgcattttgacgccaacctgaatgtcaccgattacgttttgcgcgccgatcccatgaccttcgcgatgttcaatgatcgcgaaaccgagatcgtcaatgaccggctggtgatcaagcaaataccaactggcgacatgcacaaactcatgcgcggcgttttagccattgatgccgatgcttttatggcagcaatcggagacagtgagttggctgctaaagacgtccttcaccagcgagatcaggaggtgatcggatgaaggtcgttaaatttggcggtagttccgtggccgatgccggtcaattccagaaagttaaagccataatcgatcaggatgtgaatcggcaaatcgtcgtgattagcgcagctggaaaatatggtaatgctacccgaaaattaactgatacgctctatttaattgctgacggtatggaagccggtcgagatgtcgaaccgctgtttaatcaggtcttggctcggctagaggccatcaacattgcgctgcagctcaatgtgccgctcatcaaactgttgcatacaattcgccatcatctggccattcgctattctcgagactatctggtctctcgcggtgagttcttgacagcccacttaatggcagcctacttaggctatacttttgtggacgccgccaatcttttgtttttcaataaagcaggcgccattgatgaagccaaaactcagactgcttatcaacaactagccagccatcatggtatcgtcgttcccggtttttatggtcgcgacgcagacggacatgtcaagctgatgccgcgcggcggttctgacatttctggtgcatggctagcacgcttggcccacgctgatctctatgaaaattggaccgatgtttcaggcattaaaatggccgatccgcgtatcattaaagatgccgacagtattgatgtgatgagttacgacgaattacgcgaactcacctacatgggatttagtgttttccaagaagaagcggtgcaaccggtccgtgaatgtggcatcccgacgcgtattttgaacaccaatgcgccagaagacccaggtacgctgatcattcatgatgatgaccccgccaatgatctcaaaacaatcactggtattgctggccgtaaacattatttggtcatcacggtccgcaagtaccagctggccttgcacttagaagtcattcaacatgcgctcggggtagttgcagcgcaccatctcgttgtcgattatctgcccacgggcattgacagtttcagtctgctcattcgtgaaccgcgtcgtcaagtctcggtacaggagctgaccgctgaaatcgccgctgcctgtcaaccagacaaaatggaagtcaccgaaaatgttgcgttaatcgccatggtttctcgtaaacttcgacaacgaccagccattgccggaaaagtcctcgcttatctggatgataacctgctcaacgtacaactcgttagtcagaccaatgacgatatcaatttgctaatcggcgtacatgatcttgattacgacaaagctgttcgggtcatttatagcagtattcatcaaaactttcagcgcccggcgccttatattgaggggattgcctagcgcgttacaagtcttgaatcgcatttaataaaaaagcatcctttccgcaaaaatttggctctacgtcaactggtgttgaagaataaatttatcatttgaggcggttctccatttggggagccgtctttgtcatgttatgccgtgatttggtagattcgtttgaagaagttcagctgattcttgaagccaaaacaggatcgtttgagtgacttgatgaggcggttaaccccttcgatcggaccgttggaataagggctggtgacagcggcgagaacagcgactttgtgtcgcttaagcgtcgcgatcgtcatgtccattgccgtaccgtttggctcgtaagtagctaacaggtttgccagttccgcgggatgtttcttcaccatcaaagcatcatgaagcgctaagtaggtctcgtaggtttgcttgagcttgggctcagtatcaagtgcgatatcgatggcctcctgttgcgtgacgtattcattcaaaccaaacaggaactgtttgtgtttagcgtcaggcgcagtttgatgaaaaagccgccagtttgtcttcatgatcttataaggacggctgtgtttgtcatcaagctgtttgagcgcttggacgcgtacctgatcaagggcacgagccgcaagttgaatgatatggaaccgatcaatgacgacttgggccttggggaaaacctcatgaataatcgtctgataagctgcattcatgtccatggtgaccgtctggacccgagtgcggtcagcgagtgaataatgagcgatgaagaagtttttaatcgtgcggttgaatcgatcaccaagcaaggcaatcagacgatgtgaatcggcatcaagacagataaacgacatcatgccatgagtggaacggaactcatcaaagcagagtcgcgtgggtagccggcgagccggtcggagtttgagattttggtcaatgatccgttgaaccgaggaggctgagattccgataatacgggcgatggttttgactggcaaccgttcatgcgctaacttcatgattcgctctgtcatgtgagcggcgatcgtgtggttgggttgcacgagtggcgtcttggcactgactgtgtggtaacagttatgacagcgccatcgttgcttgtgcaagtcaatgactgtcggtatttcaaccccgttgaggacgcgcacgtgggccgtgtaaaacccgttagggtgcaaggcctcaaagccgcacagtgggcaccgggttaaccggtaagtcagctcggcatcaatcacatgatactggcggcgacgtaccccgttgccgcgatattcatgacgaacaaaggcaactttgatattatggtctggtattccaaggacggacagtgtaggatcgtattgggacatttactcataacctcgcttgcttttggtttcgacgctaacaagcatagcatggacactgagtaggtgtctttttgcgttatccaaaaagggcctacacgttcagtgttgattatttctcaacaccagaaagtgtagacccaaaaatttactggaaaggatgcttttttgttaatctaaccttttgtcactagcaagttaacaacttataggttacttattcttttctgccatccgcgatggtgtcggttttgggtcatcatcagtggtttcctttttagggaccgttgttgcttttgctggcggcttcggtgcatctgcatgttgatccttgatggcatcgacaacgggttgattcccagcttgatgcatcaaggcgccgttcagcatcccgcgaatatcaattccggcaacttcttgcaacatgtctaattgtttgaccagactgccgctggtttgaccagtcagatcaccgtcaccataaagcttgatcgaatcgacattggcatatggactcatcgcggcttcgataatctttggcattgcctcaatggtcatcttaaaccgaccggattcgtctaactgacgggctgcttctgcttgcttggcgatagcttccgcctgcgccagcccaattgcccgcgttttgccagcttctgcttccccgatggccttagtggcattagcgttggcttcagcggctaattctacctgcttggctgatgcctcagctgccgcaatctgcgtagctttttgcgcttcagctgcgcgctgcgccttatacagatcggcgtcggcttgtttacgcacgctggcattcaattcttgctcttgtaattcagcgtctttttgggcaagttcaatatctttttctttttgaacttgcttggccttcatttgctcaacaatagcagcctgatctgcctgcgcttgggcgatttcttgctgtttcttgaaatcagccattttgacttgctgttcgcgttcggcatcagccacctgtgtctgccgctcaatttcttgttgcttagcttcttgatccgcttgcgcttgctgaatccgggtgtcacgactggccgccgcttcagccactgctgcatttttcttaacttcagcgatttgctttttacccagcgaatccagataaccgtttttatcggcaatatccttgatcgtgaatgagatgatctgcaagcccatttttgccaagtctgagctagccacatcctggactttctccgcaaaggcatcgcgattttggtacgtgtcttccacggttaaggtgcctaaaatagcgcgcagatggccttcaaggatttcggttgcttccgaattgatttgttcgtcattcttgcccagaaattgttctgccgccgtcgcgacctcttcttgactggaaccaattttcaaaataacggttccgttgacgatgattggcaccccttgttgtgtgtacacttctggggttgcgacttcaatcgtgcgcgtattcagactcaaaacatcccagcgctgcaggattggcagaatgaacgaaccgccattcgtaatcagcttaactcgattgccgttaacatctctaaaactgtgcttgcccgaaatcatggctccagagataattaacacttcgttgggcagtgcggttttgcgatgggtcgccaagaaaataaaaatcaaaatcaagacgatggccgcaatgatccacggcatataatcagttagaatttccataagtcccctcctctaaatgcgatggctaaccgcgccagttcacgctctcctaaatgcatcaacatatgcgatgccttgcttgagttcaatgatgacgaccttggtgccttgagccagtgtttgatgcgtgccggaccacaatttggcgggataggtttgccgcgccaaaccaccgccagtcaccatcacttcaccagtgtgaccatcagaaacagctaatgtaacagtccccaacaaataatcgcgatcactgacggatgtcgtgttctcaacgggtgccagtaatcgttgcaagaacgcgatcagcggcagtaagactaaagaaaaaagcatccacaataagccaatcgccaaaagcatggcaccaatgatcacaagaatttgtaaccaaaaaacttgttgggtcagccatgccaccatcgtcatcacctcactttttaatcacattaaatccctttcattttatcatgcaagccgtccataacctataccattatcgacacaacgtgcgttttttattttaacttagcgaattcttcatcccaaaccaatttagttatcaaaaaataaattttcgcaaaagatatgcctttagacgttacaaattttactgacagcattgaaccgttaaagctacagaatttcttttgttgatccaagattatgtgcattcacaaccaggctttaggcgggattgatagaaacctatcagttgtaattcaaagcatagtcttcagggtcttgataatgcagcgtcttggtgaacaagacatgactcgcataggccaacgcaatcggcaagataaagaataacaaggtcaattcaaggacattgccaactgtgacactgcccatagcatcaagcgctgccaagggaccgactaagccagaaaaaccaaaaccggcactggccggggtgccttgaatgttcaacgccgccccaataccgcctagaatgccagcattaatcgccatcggcaaaaagagctttggccgagaaagaatgttagccatctgcatttttggcgaaccgaggaagtgagccagcgacgtgccaaaagagtttgccttccagccataggtcgccaaggcaaaacctgcccccacaatcccgaggttagcagaacccgcaccgataccggtcaacgagattgccgtggcaataccgaccgtactgatcgggctcacaatcaacacggcgaaaatgatccccatgagcacacccatcacgattggctgcaaggccgtcacatcatggacaacgacaccaatatacttcgtgatgcttgaaaccggcccaagcgttaacatgccaatcccgccggcaatgaccagcaccagtgatggaatgagcaaaatcgtataagctttcaaggcgtcaccaagcagcactatcaacaaataaccaatggctaaggtgatcgcaaggttaatgacatcgccagtaccagcaaccgtcaatcctgttttagtcagatggtagttgcccgccccgacgatcgcagccaaagctaacgaactggtttgaatcggcgtaaatttggccaacatgccgacacagacagccgacagtgccggcaacaaagtcattgcagcccctgtcatgtaggtaaccaccgccaattgcggaaagcttggcagcaacagtttgacaattgcgttcaaaatagcgccgggtaccaaggcgacaataattcccacggataatccgttcaaaatgttcatagtaatggttttagcatcttgtttcattgacttgtcctccaagttagttgacttgatgcgctgacttgccgccttcaagaatggttttaacatcgtccagtgaaatatcaatcatatttttgaccgccgcatccgtataaaaaccgatatgtggtgaaatttcaacattcggcatagccttcaaagtttcaagtgcctgattatcaacgagcgtttgactgcggtcttctccgaaaataccggcttcgccttcaatcgtatccaaggctgctccggcaatcgtgtgatcattaagtgcttttatcagcgcctccgtgtcgacaatcggaccgcgtgctgcattgatcagataagcggtcggtttcattttacgtaacgcatccgcatcaatgaggtgggtggtcaagccgtccaacggtgtatggaccgtcacgacatcagatgtggtgagtaaggtgtttagatccacataactgaccgtatccgccaattcaggccgcttcactggatcactgacgatcacagtcgctcccaatgcccgaaaaatacgggccacagcactgccgattttaccagcaccaataataccgaccgtcaagttatgaatttcaggtgcttcaaggccggcccaactataatcatccttcgcttcgcgggcgcttgcttcccctaaatgccgaatcaaccgcatgacttgggctaaaaccagttcggaaaccgatcgtggcgaataggccggtacattggtcacaactaatccgtttgcagtggcggcatcaaggttcacaatatcgtaaccggtaatgcgcaatgtcagctgtttgatgccaaatgccttcagtttttggtaaaccatttcgtcaggaatcgcaccatgctgttgaatcacgacaccgtcataccccttggctaaatcaacggtgtccggtccaaattcaaccgtgttggtatcaacttgaatatcattagcagcgacccaagcatcaatcgcagcccgctcatcaggtcggacggtatacattagaatttttgtcatatttgcctccagattgttagcccagcatttttcaatcggctcattaatgcgttgccatatacttggcgatgcgctcggccgccaacttgagatccgccattgaagctgcataagaaatccgcacgtacccttcaccgccggggccaaaactagcgccaggaattaccgcgaccttcgcctcgcgcgccaaggcatagacgaacttccaactatcatgcattcgctccggcagcttggcaaaaatgtagaaagccccatctgggttcggcacagtcaaccctgcggcagttaaggctttgatcaagaagtcacggcgtttcatataagcttccttcattggctgcgtatcatccatgccgtttttcaaggcttcttcagcggcgcgctgcgcattggtggtgacactcgtgatcgtgaattcacttactttgccaatctgctgaatcacatcagctggtcctgcggtgattccgacccgccaaccggtcatggcatgggactttgagaccccattcaatacaaccgcttgatcaggtaaattttcacccatcgacacatgtttgcctgtatacgtcagctcagagtatatttcatcactcaatacgaagatttcgtattgcttgatcaccgctgccaaggcatccaaatccgcgcgatcgtatgtcacacctgtcggattcgtcggatagttcaaaacaacggcttttaccgtgtctttgtttgcctcaattgccttctgcaacttctccggtttcaaaatgaaaccatcttctgacgtatcaataaaaatcggcttggcaccattcaacaacacaattggaatatacaacggaaaaattggcgtcgggataatgacggtatcgcctttattcagcattgccgtcaaactcgaatagataccgcctgtcgcgccagcagtgatcaaaatttggctttccgggtcatatttggtgttgtatttcgtcgccagataatggctggcagcagcccgcaatccttgaagtcctttgctttgcgtgtaatgactctcattgttttcaatcgatgcaataccggccgccttcacatgttcaggtgtcggaaaatccggctcgccaagtgtcagcttgacaataccttcaatcccgctgatcgcagcattaaattgcaaaatatcgctgggcttgagctgcttaacttcctgattcatccgatcaactaatgccatattattttcctccaatatttttccttatagttctatcataacgtgtttcatggggaagacctaggcgtccgaactttgccgccacggtcaattgtccccttcttgagaccattttgattagcgagtcactcgttctgctgcttgaagtcaaacaaaaaccccacagtcacaagccgactgtggggtaagataatgggaatgattctcctgatctcagccacacagtcaattgcttgatctgtgtgaccgctcactcaaaggtaactggtctcacagatcgtgtctgaaaaaccagaaataaaaggactgttcgctttgagtcagcttgttggtcattatgagaacctcctaagaattagattagttacaggttactgggttgtgaagcatttgtcaaatgatttatgaggtatcattagcaattcagtttttttaacgactttttgagatcactttaaaaaaggtttatcccagaaagtgctaagccaggctggaaatttcgttcaatgtctagtgcctgaccttccatatcaagaagaacagtttgttgctctgccgtgagttgatagtgatgttcacgcatctcatctctaataaagtagccgatcgaccgcacttgcgggccaatgttcatcccttgtgttcgtttacttgctagtttatcaattgcctgttttatttttaagacaatcgtttgggcggtgacatctgtttgttttccgaaaagatgttgtagttctaacatcttaaccatgattgcttgcttttcatccattcagaatcgctccttcattcgggcaacgagttgttaaatcttaacgatatacaaaatttgccttttaattgcttgccgtcttattatcgcagtatcccttccaacatctgccgactgccaattttggttatcttatccaaaatatacgcctgaggaacagttcggggttcatttaaatttaaacgtcggtattttcaggtttttcgtcgttctttcctttaattcgtataaggacaccacgaaaaaagcagttttgctaaacgtcaacaaccaacacataccctgcagaataggctacaatgaccttaattaagagaggagcatgtagtcatgaattattcaatcacacctaacagcaccttcccggttgtcaacatcacaatgggccaagatgaaacgattcaaattgaatccgggtccatgatttatcacaatggcttggtcgaactcagcggtcatatgaatagtaatggtaagaaagggcttggtggtattatgagtgctatcggccgctcagtcaccagcggcgaacgttttttcatcacaaccgccactggcactgccccggatgctgaattggccatcgcccccggtaatcctggcgttatcaaagagttaactcttgatgacacccatcaatatcgtttgaacacgggtgcttttctggccatggacaccagcgccagctatcacatggtgagtcaaaaagtcagcggtgctttgtttggtgggactggcgggttcttcattatggaaactgccggaactgggacaatgctcgtatctgcttatggtgacatcattccgatcaccttggatggcagtcatgaatatgtgattgataacagtcatgtcgttgcatgggacagcaagctaaattacaacattcaacctgccagcggtatcattggcttcacaactggtgaagggttggtcaaccgctttagtggctctggtactgtgtatattcaaacgcggaacattgaagctttggcaaatctggttcagccatttttgccaagtagcaaagactgattgaattgccctgatttaaggaaagccaatgcacatcaaaaacccgtcaatttttggcgggtttttgatgtatgcaaggaatatcaagcaaaaattgacgacactcgtgtcttgtttgccgaaaatacatgatttgactgtctacatctaaattaggcaaattcttggccattcggtagcattttccgaataccgccagcagggttaggatcatccccacggtatcgcgggatcaaatgcaggtggcaatgcatcactgtttgaccgccatacaggccgacattagcgccaacattataaccatcaggatgatattgctggtcaatcaacgttttgcctgcatgaatgagacgattgatggctaacagctcctcctcgcttaggtcgaagaagttgcttcgatgcgtccgcggaatcacaagcaagtgaccctggctcacaggatgaatatcccaaaaggccactgcgagatcattttcaagaacgatactggtttggggaagatggcaaaagatacagtcggcttgtggcatcatgatttcctttctaattaagtcttaaatcaaaaataagcacaaggcgcttgcagatctgaactgctgcatttgccttgtgcttattattcaatacgatggattatgcttcaagtttctctttacttgaatctgcaatataatgcggcacttcatcatcgatgaaatagaccttgtaccaaacaaggaaggtgtaaatcgtccaaactttccgacgatcatcgctttcctgccgatacgtacgatccaagatatcgagaatggcatcctgatcgaagaattccttgacccagtcttgttcaaacattttgcggaccgtcttgtagaacggttcgtcttccaaccactgcttgaccggcactgggaaaccgagcttttcacgactcgcccattcttccggtaagtgacggttagcagcttcacgcaatgcatacttcgagttgtgcgaattgatcagatacttggttgggataccagccgcgaccttagccacttccttatcaaggaacggtacccgcaattccatcgagttggccatcgacaacttgtcagctttcaaaagaatatcttttggcatgaactggtggatgtcgagatactgcatcttcttaacttcatcatcgtaatgacgtacctttttgtacgaagcggtcacgatgtcacgaacactctcactttgccgaaattccggttgtaagatcttgtcagcctgaccctcatgaaaaaccagtgcttcgccgatgaaaaattcttcggcaggggctgttgattcataaagatgcaagcggccatggaaattcggcatctttttcaggccatgggcgatcgtatacttaacaccttttggcaacttgcgtaaaccgtccgcaaagactcgaatggcgtggctgcgcgtatggaagccatagttcgcataaccagcaaagagttcatcagcaccttccccagacaaaataacggtcacgtctttgtgtgccagtttcgttaggaagtatagcggtacacaggaaggattggaatctggttcatccaaatgatattgaatcaatgggaagttatctaacgcttctttttcagtaacaatatcactagtgttatccaaaccgagtttgtcactgagttccttagcggcaacgccttcgtgataccttttgttgtcaaaaccaattgagaaggtatgctctggccgcaacaaggcggtgatataagaggaatcgacccctgatgaaagtaaagacccgacttcgacatcggaaatccggtgagcatcaactgactcagaaacactcttgtcaatagctgcaacagtatcttcaaagctcaaattgttcgccttgaaatccatgtcccaatacttcttaatggttaacttgttatccttcaaggtaaaatagtgcccttcaggaatccggtaaacccctttaaagaaagtctcatccaaagccgaatattggaaagtcaaataaggcttcagtgcttccttgttcaattgtttcttaaacttaggatgcttcaaaaatgctttgatttcactacccacaataaaggtatcgccatcgtgatagtaatacattggcttgatcccaaagaaatcacgcgcgccaaacatttccttcttattatcatcccagataaggaaggcgaacatcccgcgaatcttcttgagaagttcgtccatcccatattcctcataaccgtgaagcagaacctcggtatcggaatgggttttgaacacatgcccagcagcaatcaaatccttgcgaatgctctggaagttataaatttcgccattaaagatgatcgcaactgtgccatcctcattcaggatcggctgcgaaccaccttttaagtcaatgatcgacaaccggcggaatccgagggcaacgttatcattgatatattcgccgctggaattaggaccccggtgtttgatcatgtccatcatgttattaataactggctttttatttaaaattgtcttgtccgcaaacgcgatgattccgcacatacagttaaccccttttcgcgtgaatgacgatcattacttgtttcagtataaagatttagcgtcgcaagtcaattcaagagcgtgagccaccccggttagaaaccggagtgtaagtggccttgcccgtgatggcccgggtttggccattgcggtcaaggtccttacacgcaggtttctggggtggtgatcgcgtttaaatcagagcgtgagccaccccggttagaaaccggagtgtaagtggccttgcccgtgatggcccgggtttggccattgcggtcaaggtccttacacgcaggtttctggggtggcgatcgcgtttaaatcagagcgtgagcaggcccggttagaaaccggagcataagtggcctcggacataaatggctgggctttggccatttatgtccgaggtccttatatgtaggtttctgcgcctgcgattgcgtttaggtcagagcgtgagcagggccctgagccagttcgtgcgttttgaagaatagtcagcatctcattcttttcggcaagaaatcatatggtatgtgtcatcaaagactctcagtttgatattttaggtaagccttgtgagtaagcccaatttcaaaataacaatccaagtcgctactacttaaccgttttgcaaaactctttaagtttatctataaaaagttgcttttgttgaatcccaatatctaaacaaaatagtttgtacggatcgacctgtttgcgggaaagtttcagttttagtgcctccaactccttaatctcatcagttcgagtattaatttctgaggtgatcaaggccgaccttttctgctcatctaattgtgaactgtagaatagccgaaccataaagtcccattttgtttttttgctttcaactggctgttgcaaataactctcaaaggcctttttgcctttggtcgtaatcgaatagaccttcttgttcggcttccccaactgtgaaacaacttcaaacgaaacttttccttccttgtcaagtttatgcaggattggatacacactgccaaaagaagcgttataaaaatttgagaaaatagtggaaaattgatttttgatttcataaccggtggcaggtttatccactaaaatgccaagcacaatatcatcacttttcactttcatctactccttaaagaaattggtttaacaggtactagccaaaaacaaagcgcgatcaagaaaatcagcggtgttgcatattgatatagctttgtaaatgctgttacaaattgttgggcaatttctcgcttaattttgaccatcacattatttaaatcgcctactgacttgatcaccttttttgagatggtcgcttttatttggcgacggatacttgctgggagctgttcttcttgaataccctttttggttaaataagcttgatattgctgctgaatcatctcacgtttttgcttctgactgacgaccggtcccgactgcgatttagctatcccctgttgattgttcagatgtcgttttatttcgtttaatgtcttagatcgttgcgatttagagatagccgtttggcgaatttgatcttctgaaaagctcaacgccttttgtttagcatgcgatatattaactcccagcgcgctaacgaaaatggcaactgccaaaacagttccaagttgtcgcaaaacaccgataacactttgcgaagctgttaaatcgctgccttgaaaaccggccgttgatagtacgctaattgggccaactataacgccgtagcctgcgccgatcaacaaacaatacgacacatatagtaaatagtttaacgaagtaccgatagtggaaaaacctaagtagccagcccctaaggcgataaaaccaatggccagtaactttttgggattcgtttttctaacgagaaaaccagcgaggggcgataagatgaagatcatgaatgtcgctggtgtaattaatagtgccgattgaaatgctgttttatcaaagatatttgataagaaaattggcatgatgaccataaaaccgaccagaattaactgaccaaacaaggttgccactgatgctaaatcgaaattagcatttttgaacaaaccaaagttaatcatcggtacagaaacgtgtttttcccaaaaatagaataatacgccagatatgatgaaaaggctaaataaagcataaataggcaaattccatccccagaaccttagctgaatcaatgctaacgtcagtgaaacaagaccaatcactgtcagtagggagccaatccaatcaatcttagtgttttcaactggtaagttgttaggaagcgagtggatgctcattaacaaagcaataagggcaattggaatattaatcataaaaatccatcgccatcccataaactgtgtaatcaagccaccaattgtcggcccaaacgctgcggcaatcccctgtgtaatacccacaaataaagttgctttacgtttaaacaaatctgactgagtcgtaatggccagatccatgctcagtgggaaaataacagcagcaccaaaactctgaaataaccgtccaagtatcaaagaaccaacgctatggctgataccactcaacaacgaaccaagaccaaatatcactagcgcaatgatgaaaaagcgcttctttccgtaaatgttagcaagctttcctaagggaatagaggtagaggcaaaaataatcgtgtaagcatttaacgcccatgaaacgcttgttaaactcgcagacaaacttgtctgaatttccggaagagcaatgttcattatggtcgtatccagcatgactataaaaatccctagacacatcgccattaaagctgttttatttgtgtgtgaatctgtcatcaaaagtcgtctccctattaatttaatttatatgaatacaattcataatatagacgcagctttatttttttgcaaggattgtttttcgttttcttagtgcctcgaattttttacgtaaattgcaagaacaagttagccagtcgttgaggacaatcccagaacaggccgttatcaaatagaagttgtggcgctagagagactactgggccatgcggcgaacgcgccgagcttcggcctcaaagttttgctggggtgtgcagtagccctgttgtttgcgaggcaactgattcaagcggtcttgcgtgtcctgcacttgactagggctaatgtcatctagggacatgcccttagggaagtcctggcggatcatccggttatgtgcctcgttggtgccacggtcgcaggacgtgtaaggatgggcgtagaagatctcagtttccgtcccagcaaaagcagtatttaaggcggtgaactcgggtccgttgtcggctgtgatggtcttgatgcaagctccccattcgcgcttgattccacgcaatgcatagctcacagagtctgcatctcgtccttcgatcaagcggagaagttggcaacgggtcttgcgctcaatcagagtcaagatgacgctctccttgccattgcgtttaccgacaatggtatccatctcccagtgaccgaactgcctgcgtcgttcaacgaccttaggccgttcctcgatactgcggccagccaggcgcttagccttggtgtggtgctggtgagaggtcttccgcttagtcttctccaacaggtcgatatttcgaatatctaggcgttggtcgtcaatgtactggtacaaagtcgaggcacaaacaagctcttcaggagtaaacagcttgtgtcgcttggcatagccgattgaagcatccggcgaccatttgtcctgcttagctcgctgtacgtaccaggctaagaagacctgtacgctggcgaacttgtcaggacgatggcagctcaagcgtgcagtctcgtaacgtgcctgagcagcctctgggaggtattgtcgatggtagacgcgcttgccattactcttcttgacctgatctactgtacctcgcttgatttcattattaatggtctgcgggcagacgccaatttcagcagcaatccaacgattggacttcccagcttggcggaatccggccacttttccgcgctcgagtgatgttaagtgctgacctttttggcggtgtgtgctatcctgtttctgcatcaagacaatatcctcttccattgtttgtgtaggaacttcaatgatacaggatatctgttcttgatgttttttattgtccaaaaaattttgagacagtggctaacttgattctaaaatgcgcgctcgaattttttacgttagaaaaagactagccaaaacccgcgagtagagtggtatgcactctttttaacggcgataaaaatgcttcaaaaatggtagttaacaccatatcgtaatcaaagcagtcaattcatacatatatttaaagcccacaacacaaaaacgattccaaaacttctgaaacaagcagaagctttagaatcgttttaaatatgcatcatccgtatgtaatctttcaaatgacgcattgatcaaaaaccaagacatgatttcagagagcagtcagttgcctcatatgatcattccttgttttcttgaatctaatgttcttcaacactaaagaggctttaaaacgcaaaaaaacgggtctacactttctggtgttgagaaataatcaacactgaacgtgtaggccctttttggataacgcaaaaagacacctactcagtgtccatgctatgcttgttagcgtcgaaaccaaaagcaagcgaggttatgagtaaatgtcccaatacgatcctacactgtccgtccttggaataccagaccataatatcaaagttgcctttgttcgtcatgaatatcgcggcaacggggtacgtcgccgccagtatcatgtgattgatgccgagctgacttaccggttaacccggtgcccactgtgcggctttgaggccttgcaccctaacgggttttacacggcccacgtgcgcgtcctcaacggggttgaaatgccgacagtcattgacttgcacaagcaacgatggcgctgtcataactgttaccacacagtcagtgccaagacgccactcgtgcaacccaaccacacgatcgccgctcacatgacagagcgaatcatgaagttagcgcatgaacggttgccagtcaaaaccatcgcccgtattatcggaatctcagcctcctcggttcaacggatcattgaccaaaatctcaaactccgaccggctcgccggctacccacgcgactctgctttgatgagttccgttccactcatggcatgatgtcgtttatctgtcttgatgccgattcacatcatctgattgccttgcttggtgatcgatgcaaccgcacgattaaaaacttcttcatcgctcattattcactcgctgaacgcactcgggtccagacggtcaccatggacatgaatgcagcttatcagacgattattcatgaggttttccccaaggcccaagtcgtcattgatcggttccatatcattcaacttgcggctcgtgcccttgatcaggtacgcgtccaagcgctcaaacagcttgatgacaaacacagccgtccttataagatcatgaagacaaactggcggctttttcatcaaaccgcgcctgacgctaaacacaaacagttcctgtttggtttgaatgaatacgtcacgcaacaggaggccatcgatatcgcacttgatactgagcccaagctcaagcaaacctacgagacctacttagcgcttcatgatgctttgatggtgaagaaacatcccgcggaactggcaaacctgttagctacttacgagccaaacggtacggcaatggacatgacgatcgcgacgcttaagcgacacaaagtcgctgttctcgccgctgtcaccagcccttattccaacggtccgatcgaaggggttaaccgcctcatcaagtcactcaaacgatcctgttttggcttcaagaatcgtaagcgcacgattgtgaggtacatttaaaacggcttcggattcccttatgattgaggaaataccgaagccgttgtcttttattgaggtttatcttgcacagattgcccggacttgcgacgaccatggtaaataatcctgcagcgctttagaatcgccaggaacggaaaggttgggtaattcagtaaataagtattcgaggtatttgcggcagtcgagaccgttggcctcagccgaacgcatgacactcaagataatcccgcttgaccgggcccctttgaaactcgtggagaatagccagtttttgcgaccgataacgagttccttgacggcgcgctcaacgcggttatttgaaagctccaaacggccatccaacaacacattttccatggcttcgcgttgactgagtgcatagtcgatggcgcggccgaatttggattgcggtaaggcgtggacactttcacaccaagtgaagaaatcggacatagttgatttcagttgactttggcgtttttgatagcgctgatcaggggttaataaccgccatggccgctccatcttgaacatgcgatcacaatatgtcacacctttcttggcaccgctttgcgtgttgccctgtttacccatggcctcgaagaacttacgtcggatgtgggaaagacaggcgactcgggtgacctgatcaagtttgtcgtacacttgatagccatcggtttggagataatgtgtatacccgttgaggaagttcttcgggacttccgtggcgcgggaatcggcgtgctcatagagaataatctgctcgtcttccgcgcgtccagaggcgaaaacccagaaataggtgtttactttctcgctttccaacacgcgatagctggtttcatcggcgtggacgacggtttgtttgagcagtgtttgatgcatcagttcgtagagattgcctaacccatagtcacaagcccgaatgtgccagttggtgatttgttggcgggttagttcgagccccaagtctccccaatcctttatctggcgataggctgggacctttttacgatacttttcgatcatcgtttgggttaggatgcttggtgaggcaaagctgttaggaatgaacggcttcggcactatcgcctttttgatgacgctgtgatctaactgattggaacactggcgacattcataggcgtgctgatagtggacgtggacttcaacgtgttccggaatccgaaccggttcgcggctggtcgccgtggccccaatttcacgcatctcagcggcacaatgtgggcactggcgttccgctccggttagttcgtggtgcacagccacttcaggaaaaggagccagttgcgctgctttcctgcctttttgttttttacgttttgcaggtttgtcatcttgctcttctggttcaggaactgttggcgccacaaaggttttggtttgatcaaagagatcaacctgaccgtcagtgagactttcacgcttagtgccgtacaggcgccgcattaagaactcgacttgttcgcgaagcagcgcgttctcttgtttgagatattcgaattgttctgtcgtcacgactgcttccgctgacatctcgcgccctccgttaaaatggttgaaaaaagtatatcaagcggccacacgaaaagaaagccttttcgtcagcttcaagaaaagactttctttcagacaatcagtacacataccccggggttacaggctgaatggtacggcgttcttcaatggctaaaccattgaccagacgtgacatttgacgataattcaaacggcgaatttcactgcgatcgcgcggccattgcatatagccgttttcaaagcgcttgtataaaagcagaaaaccacttttggtccaatacagtgctttgaaacgatccttacgggtaccacagaagatgaataacgcattgtcgaacacatccatcttgtactcctccgtgaccaaggccgccaagccatcaatgccttttcgcagatcggtgcgaccgcaaatgatgtaaatgttagctttggacaggtcgggtatcatgggccatcaactcctgcaaaataatccgggccatcaccttatcgatgccattgtagaaaaggacttcggcttcgtttagtttaattttggctcctagtttgggtttcaccacgacggcggcaccgtcgcgattgaccatttggattggaaccagatcattggtttgagtcataaagaaatcctccaatcttcttgatagaccaagtatagagggaggattttgacaattataggtactgcactatgtgacgcttaccaagaatcagctgaacttcttcaaacgaatctaccaaatcacggcataacatgacaaagacggctccccaaatggagaaccgcctcaaatgataaatttattcttcaacaccagttgacgtagagccaaaaaaacagagatccaagttcctacaggtgaacttggatctcctaagttaaggatttgaccgatgcaataatctcaaaacttttcttggtactaattgtaaaaccttcttcgataaccttaatactgcgacaccttctaaaaaatacttattcacttgtacggaacgacgagtgttgaaatgatgttgccctataactaggcgttgtttggtggtcctattgacacaccctattgaacatctatgggaagctcattgccccgcttggattactgagtctttttattagcctcgtacctccatgtgtgttcatctttggtcagttggaacatgaatcgtacgactggtggcgcagatacttactgcaccaacgctctatttgtctattcgtgctttgcgacacacacatcactttcgagctggttcgtcttggtaatgctagacaaggatcgtaatgctcggttcctgcatcgacctttttggttcttccttaacttcaattaaagtgtatcatgtaagcgctaactttgcaagctaatcacgtaatttatttaaaaaaatcgtaccatccgcgatcaatactgaaaacgccgaacacggctcgcagcaccgtagccatacaagctaagcagccgctgttgtgtatccacactcaccacataaccggcatattcgctcggcataccaaagcgtcgatcataccggcgattgaacttagttgttagaccgtgatgacggcccatcaacgcgcttgtattctgcaggctgtaatgaatgccattaacaatgtaatctgcttctaaatgatagtgcccagctaaataaccaaccactcggccgcttgactgcctaaagtcaaaccgcagacgaccgccaaacgctggtgcctcgccagtatgcaacaccccgctcgcgtggaagttaaatgctcgcaataactcatggacagcgcggccattaaatttcagtgccggctggccattttccttcaaagccggggcatggctcaacaacaagacatctcgcttaccagcaccttttaatgccaatgcaaaattccgtagctgagcgaatgagaccgcaagtgttttcttgacatcaaaagccttgtgagcatcaatcaaagggacatctgccgtattcaaaacaatgatccgcaagttaggaaagtcttgaaccattagcccttcttgcgaaacagccacccctgtctgctcagcatttggtttaaaaatcagcgtctggttcacttctggcaaaaaactgccgcgatgccctgcacgcttttcggcaaacttgtcattatcgtcatgattgccttttgtcacaagaaacgggacaggaccgctttgaaaatcagccatgatgttccgtaatcgcagtcgagtcagccatggtgcctcggacccatccaccaagtcgccaagatggacccggagtgccagtggtaattggccacttaaccattgctgttcgcgtacatgccagtaaccagtaggtccataataagtggtggcaaattttgccttatcgtgggtatccgtgatcaacgcaaagtttacggctgaaggcgacagcaatggcgagattgcagaaacaaatctggtcagatcttttttgacaaatggtcgaattgcaatgctcatgaaaacctccatcgtgatattcgggtcagatattcaagaagacgcctaatgcgagaaagacaacctgggccaacgtcgtgataaaaagattcttgatggcattcggaaaagtcagttttttaaccggattggctgcaaaaccgcgtgcgttcttcaccaccatgggtacggtgatcagggtcaacaaggttaattttggcagtaaccccagcacaacagcagcaatcagcatcaaaaagccaattgtatataatccatagaagaagatgatgctgcgcgaacgcccgagataatgcacaatcgttcggcgcttaagcgtttcatcctcttcttgatcggcaatattattggccagcaacaaggccgcaatcgtacactgtgccaatccgctggcaagataaaccgatccgatcaacggccatgagaaggcggcaacattaaagacgttgacataaacggcaattagaaaaatcacgaaacccatcgtaaatcctgagaaaaattccccatacggcgtggccgaaattggtcgcggaccgccagcataaccatagccgactgcaaagctaaacaatcccatcaccagcaagggccaccccgtgcggctcaccatccagaggcccaacacaccgctggttaccatcataccgacaaccatccacccaatcatgctcgggttgagatgatgaaccccaataatgttagtcttctcgcgaaaacgcaacgctgctgtgcgctctgatcgtttgtaatcttgataattatcgttcgcgtcaaccgccatgttaaacagcaacatggccacgaagaaaaccagtaattcagggatatgtaacgtatgataatgataccaggcaaacaatgtgcctaataaaaacggaaaaactgaagccgttttggccttgatctcaaccaactcaagaaaaacagataaagacatgacaacctccaacaattgacttttaagaatcacatacagtagagtgaatatgtctataggaaagagagaaaatgcatgattcatccactgtggcaccgattccccatggtctatcaacaactcgaacagattcagcaacggcttgaacacgtcgctgttttgcgtgagccgcaagtccacgcattgatccagcaacagatcaacgctggcggcaaaatgctgcgcagcgggctaatgcttatgctagcgcgtttaggcaaccctgacaacgacgatctcataaccgccggcgctgccattgaggccttacatctcgcgaccttggttcacgatgatgtacttgaccacgccgacctgcgccgcggttccgataccgtctcagccaaatcaggcaatcgtgaggcaatctatgctggcgatttcctctttgccatctattttcaattattaagcgaacaaaatccagcaacaaccgatttagcgaccaatgcgcgcgtcatgaagcacatctttatgggagaagttgaccaaaatggtcccagcgcgccactcattccaagtgtttccgaatacttgaaagccatagccggcaaaacggcagcactttttgctttggcaacttacactggtgcgacaatcggtcaactagactttaccgaaaaaaaagccgcgtatcgttttggccgccaactaggcatggcctttcagatgattgatgacttgttggattacacccaaacaactgctacgctgaataaaccggtgctcgaagatttacataacggcattgtcacacttccattaatttatgcctatcaaaacgtccccgaacaactcgccccaatggtcgggaccgcagcaaaaatcgctgccaacagcgaccgaattgcggcaattgtgagtgaacacggcttgccccaagcccgtcaactcgccactcgctacactgataaggctatcaacgccctcgcgccattgcctgatgcgcgcattaagcaagaactacgcaagctcactcagcaattattgcgacgagatcattgatcgtctggacttcatatatgcctatcctttttgatagaaaagtaagtaccggcggataaagttcagctaacaatagaaccagcaaatctagactcagtcggctttctttgtgatcttcctaacgaaaaattaagtattaaatagcccgccacacttgttacatccggattctgcatcataccaactttttaaaaattgaaattgtaatatttcagcccgacgttttcacaaacattgggctttttcagtggtatgatgtatgtaaagcaaaagtgaaagagtgatcaaacatggcaaaagttctctccatcaacgctggcagctcctcactcaaatggaagctgttcgagatgccaagtgagcgccagcttgcagaaggcgcgactgacatcctgaaacaatcaaccgtcaagatcaagtatggtactgatcaagcttacgaaagcgctaccccaatttgcaattatcgtgacgctgttgccaacctgctctctaacctgcaaacactcggactcgttcaaaatttggatgaaattaccggcattggccatcgcgtggtagctggcggggaattattttccgccccaattgtcattgatgatcgtgttctggcgcagattcgtgctctgcgtgattatgctccgctccacaatccggttgaagccgactgtatcgccatctttcgcaaaatgatgccttgggcacttgaagtcgcagtatttgataccgcatttcatcaaaccatgaaaccagtcaattacctttacagtattccgtatgagtattatcaaaagtatggtgtccgtaaatacggtgcgcatggaaccagcgttcgctatgtgagtgctcacgccgccaaaatgcttcgcaaaccattggcacaaatgcgaatgattgtgatgcatcttggggcgggttcaagcatcacggccatccaaaacgggcaatcggttgacacatcaatgggctttacccctttgtccggtgtcacgatgggcacgcgttcaggcgatgttgatgtgtcactcatcggctatctcatgaagaaacttgccatcaccgatgtcgatcaaatgattgatatcttaaacacagagtcaggcctacgcgggatctccggcattagtcatgacgttcgcgaccttgaagccgctgcgccgactaacccgcgagccaaactggcgcttgatatctttgtgaaccgcattgttaaatatgtcggtgcttatgccgccttgatggacggtgtcgatgtcctagtcttcacagccggcatcggcgaacacagcagtgacattcgggcacgcgtcatgcaatctttagattatctcggcgcgcggattgatgcgagcttaaacactcaaatccacgataacgcaggtgacattactgcagctgattcaaaggtcaaaacactggtcatccccacaaatgaagaattgatgatcgtccgcgacgtcatgtccttaagccaagcagtggcgcaagcggaatagtggtaggcgttcgctagcccggtttctgggctggcgaacaccttatgatcgagcctgagccagacccgtcgaaaataaaattttatagtcagttctgttggcaccagcagcaaaggatcggcaatgttgtcgatccttttttttcgtaaattgcaagaacaagttagccagtcgttgaggacaatcccagaacaggccgttatcaaatagaagttgtggcgctagagagactactgggccatgcggcgaacgcgccgagcttcggcctcaaagttttgctggggtgtgcagtagccctgttgtttgcgaggcaactgattcaagcggtcttgcgtgtcctgcacttgactagggctaatgtcatctagggacatgcccttagggaagtcctggcggatcatccggttatgtgcctcgttggtgccacggtcgcaggacgtgtaaggatgggcgtagaagatctcagtttccgtcccagcaaaagcagtatttaaggcggtgaactcgggtccgttgtcggctgtgatggtcttgatgcaagctccccattcgcgcttgattccacgcaatgcatagctcacagagtctgcatctcgtccttcgatcaagcggagaagttggcaacgggtcttgcgctcaatcagagtcaagatgacgctctccttgccattgcgtttaccgacaatggtatccatctcccagtgaccgaactgcctgcgtcgttcaacgaccttaggccgttcctcgatactgcggccagccaggcgcttagccttggtgtggtgctggtgagaggtcttccgcttagtcttctccaacaggtcgatatttcgaatatctaggcgttggtcgtcaatgtactggtacaaagtcgaggcacaaacaagctcttcaggagtaaacagcttgtgtcgcttggcatagccgattgaagcatccggcgaccatttgtcctgcttagctcgctgtacgtaccaggctaagaagacctgtacgctggcgaacttgtcaggacgatggcagctcaagcgtgcagtctcgtaacgtgcctgagcagcctctgggaggtattgtcgatggtagacgcgcttgccattactcttcttgacctgatctactgtacctcgcttgatttcattattaatggtctgcgggcagacgccaatttcagcagcaatccaacgattggacttcccagcttggcggaatccggccacttttccgcgctcgagtgatgttaagtgctgacctttttggcggtgtgtgctatcctgtttctgcatcaagacaatatcctcttccattgtttgtgtaggaacttcaatgatacaggatatctgttcttgatgttttttattgtccaaaaaattttgagacagtggctaacttgattctaaaatgcgcggatccttttttttgtccaaaaataaccatgttcaactacttgccttttcttcatctgctgtctatactgtgcatatatcacatatacagtatagacacaccaaaggagatgttcgccatgctcactgtcacaggcttaacgaaacgatttggttcagcaactgctgttcacgatgtttccttcacgatccaacccggtgaaattcttggcttgattggccaaaacggcgctggtaaaacgaccacttttcgcatgctactcaatttgcttcaagctgatcacggtaatatgacttggaacgatcaaccgctatctttgctcagccgtgagacgattggttatctccccgaagaacgtggtctttatcccaaaatgaccgttgttgatcagatttgttttttcggagaattacatggcatgaaacgcgctgcggtgatggctgttctggatcaatggctagatcaatttcaggtcaaaggtaagccaaccgatttggtcaaagatctctctaaaggtaatcagcaaaaagttcaactcattgcggccatgattcacaacccgcagttcatcattttagatgagcccttttcaggcttagatccggtgaatgctggcttgcttgaagctggtattcggcggttgcgggatgctggaagtgccattatttattctagccacgacatgggcaatgttgaggccatttccgataaattggtgatgttgaaaaatggcgaagtcgttttatcaggtgccctcaatgatattcgcgatcaattcggccaaactcgcctctacattcaatctcctctcacccaagaacaattgctatccttccccggcgtggtcggtgtcgcccaacgctcccgagggtttctcgttaaattggctgagcctcaagccggtcatgatattttcacagcggccacccaacaaggttatattcctgaattcagtcagcaagcaccttccttagatgaaatcttccgaatgaaagttgaggcctagtcatgaaaaaaatggatgtgattttccgccaagtcttcttcaagaatcttaaaagtaaaatctggttgtggatcgtgctcggtccgttggtgctggccgctgttttcggcggggttttttggctgatgaatcaaactgatcaaactagcaaaatcggtgtcgtgacgtccagtccggcattgaccagcacgctgaaagcaagcagtgatgatgatcaacgctacatcagctattcgtcaacggcagcggccaagcgcgcgatggctgatgaagatcttgatggggtcttgaccatcagtacgcaaccaaccacccatgccagcctcattgaacgaactgatggcaatggtgtcaaccaaacccaactgcaaagcgccttagcacaggcacatactaaagaagttgcggctcagttgaaattatcgaccacgcaattgcaaagtcttttcgcgacaccccagctggccaccaccagtgtttccgttgataaaggaaaacttgtcagccggtctgccaagactcaaaaatcaggcgccatggtcgggtttattctcggcatgctgatatatacctttgtcattagctacgcttccatgatggcacaagaaatcggcactgaaaaaggctcccgcattgaggaatccatcctcactgccatcacgccgcaagcacagttttttggtaaactgctgggtattttagccttgatggccgtccaaatggcgatctacggcgttgtgacgcttgccggtggtctcttactgcaacgtttaccgaaaaatccgctatccagtttgatgacgaacattgatctcagcggtatcagcttaaatatgctgcttttcagtctcgctttcttttttgtcggcacgctcacttacaccgttttagctgctttaactggctcattggttgctaatcaagaacaaatcggccaagccacgaccccaatcgttatgctgggaatgctaggctatttcggcgctttgattgttgctggcggaacctcaccgatccttaacatcgccagctacatccctttcctatcgaccatgatgatgccggttcgcctaggcgcaggacaggtcactgctgttgccgggtggtcagcattaggcatcaatctcgttttcctaatcttattcacttggctcaccgtcaaattttaccagaccaatgtgttaagctattcagatggcggcatgttgaaagctttcaaacgctcatggcaactacaacgcgccgcccgcaaacctaaacctgttaaatcatgaaacgaggttaaccatgcggatcgttatttcgaatcaatccggcaaaccgatttatgagcaaattgaagatcagatcaagactgcaattctttctggtcaattaaaggtgaatgaacaactgccatcaattcgcagtctggcaaaagatttacggatcagtgtgatcaccaccacccgcgcttatcacgaactcgaagcagccggattcattacgaatgtgcaaggcaaaggcgcctatgttttgggtcaagacagtgcacttgtgaaggaaaacgctttgcgtgaaattgagacctatctgaatcaagccatcgatactgcaaaaatggcgcgcattgcacctgaagaactacacacgatgttggatacattgatgcacacggagggagacactgacaatgacaactgatctgctaaccgttacgaacttgaccaaacgctatgccgattatcaacttgctaatgtcagttttagtttacccgctggctacatcatgggcttcattggtcccaacggtgcaggcaaaacgaccacgatcaaagccattttggatatgatcaaaccagactcaggcaacatttcggtacttggtcaaaccacgccacaagcccgcgaagcgattcgcgatcaacttgggattgttttagatggcgcggtttatcctgactcatggccagcagaagctgtcaatcgttatgttggaccgtttttccctaattgggacacggcttatttccagcaactgctgcgtgactttgatattccaaccaagcctaaatatcacgatttgtcgatgggcaccaaaatcaagttacagttagcggccgctttggcacatcatcctaagctcttgatcctagatgagcccacttctggcttagatccgattgcgcgtgatgaattgattgccattctgcaagattttattcgcgatgagcaacacagcgttcttatttcgacacacagcatcatggagctcgctaaagtggcggattatgtcacttatctgttggctggtaaaatcacgttcactggtccactcagcgatctccttgaccgctatctgttgattaaaggcggaccgaacgatttgactgctgcaatcaaagccaccttaattggtttgcaggaaagtccggtcggtttctccggtgtatggccagctgaccaagcagcaatgttgccagacaacatgattcaggaacctgtcgatttggaaacgttgatgatcgcgtttggtaaaggagggcatccccatgcgtaatgttgccaaacttgtcgccttagacatgggtgcgctttactccggcacgcataaataccgcgggtggtcatatctggttgcttttctgatcgtgctcattgccttcttgaatggtgatgccgccacaccacttgctggcgctatcaccggtactagcgttggtatcttgatgatgccgtttgccagtgttgatcgacatggcttggaacagttgtacacgatgctgcctatccgccgccgagagattgtcgccagtcactacctatttggcttgctcgtcatgctgatgattgatctttatgccgaattcatcgttgcagtcggcatgatcgctcgtttcaacccgatacatgactaccatgccattatctggatgttatttttcgcaaccggccttgtcttattacaaatgacattgtcgtttccgttaatgattgggcttggcttccaacgtgccccgttagctgcttatttaccgattggcattgtgttactcgccgtttttattgaggctggcttagaccttgacttagcagtcttgcggccctggctcacggcgttctccatacttttgatcgtcgcctttgcgttttcttggtggctgagtacctatctatataaaaggcgagaattttaacctttaaaaaccaaaaagccgtcaccttgctgcttagagcaagatgacggctttttggttgctttattcagttggcaaacaagcaaggctcgtgcatgaatcacgcctcaaccttgaccatctttaaatgccggatataaagtcatcccgccatcaatgaataaggtaatgccagtcacataactggattcgctggatgccagccatgctgcaccagctgacacatcttcaggtttgccaattcgattcatcggtaccattgaaactgtctggtcatactgcgccttatcagcaaatttctcggcgttaatcggcgtttcaatcgcaccagggccaatcgcattgacccggatcccttgcttagcatattccatcgcaatcgtctgggtaaaaagtttgactgcacctttggccgccgcataactcgcgaaggttggccacggaatttgttcatgcaccgaggtgatattaataatgttgcctgcctgatggtgttcaagaaaatagttcagtgcggcccgcgctcctaaaaagacgccggtttgattaatggcaatgactttgttccagtcctccaaagagacttgatgcgttggttccttgatttccatgccagcgttattcacccagacatcaagtccgccaaaatgagccgttgctgtctcaactaagctagcaatgccatcttctgtggcaacatcagcatggatgctcaccgcctgcccgccgtttttgatcacggtgtcggcgacttgctttgcaccttcatgatcacctaaataattgatcacgactgacatgtgctctttgccaaatcgttctgcaatggcagcgccgatgccttttgaaccacccgtcacaattgcaatctttccgttcaagtcttgatacatgctcgctcttcctctcatgcgtgtggtcacgcagcggtcacctagaaggtaggccctaaattcagtgtaggggtatggtattagattgtaaaacattgtgctgcactaggatgccttttcaaaagaaatctcaaattccgtctaaaaaaaacaaaaaaaagccaaaataaatcaaaaacgatttatgagaatcatccaccatttgtaaacacgtgtcttttaggcatttgggattaaatacgcgcaaatattatttagaaacaataaaaaaggctctgtatctttctcttctcaaaaaaaccttatcaagaccgattaaagttcccccgaattattgagattttagtacttagaattaaagagttctaaaatcattatccaaagttcacttggtcacaagtcttttatgcctcttttgcgtcaacaatgtttgatatttaaggccaatattcttctttatacatgttctttaactaccggcgtatagaggatgaatcctagattgcaacaataaagttaccacctagaaagaggcttgctcactgcttgaactggggtttgccaacggagacattttctaggtttgttattgataagcgctgtggcttgttgaatatcggtctctgaaacctgatcaaactgtgttcccttcgggaaatagtagcgaagttctcgattgaaccgttcatttgtgccccgttcattcgggtgataggcgtggcaaaagtaaaccggtatccgatagcgctttgtaagcgcctgatcgcaggaaaactctttaccgtgatcaaccgtcactgatcgaaccggacccggaaagtccaccatcagtcttgcaaatcccttgagaacagcattttgtgataagttttcaagcttagttgtcgccattaaacgtgtcacccgatcgacaatggtcaaaacagcagcctttgacccgcgaccaccgcgaactgtatccatctctaaatgtcctttttcggttcgccgattagctgactcactgcgaatctcaattgaggtgcctactgcttggttatagcgcgaccgaaggtcttgtcttcttttatgacgtttaccgtgatcaaagagttggcttggctgaaaatcgacttgtctttgataaatccagtggtaaatcgtgtgtggcgcacagtgaacggcataaccgaccatttcaggggaccaacctaggtttagcttctcagttaccatccgcttcaacttaggcgttaaaatcgagtgccgaccacaacgatgccgacaagtatcggcatgatcctgagctataatggcgcagtaatcaccttcagggcaacggtgaagctcatgcctaatagaaatacgagagcggcctaaggtcgcggcgatgtattgaatcgtgtggtgttgcatcagttctatctgagatcgttcaattaaggttataatggccatgggacctgtccttctctctagatggtatgttatgcaaacaccattttagcaagaacggacaggtcttttttcacattttctgggtggtaactttaattatgcaatctagggaattaagtatccggtgagaaataatcggtaaaactgtaagcgggtacattttatatgtgagaaatatcacacagttgttgtgctacttgttgtgaaggccttaacattgctggtggaaagaaaggactgattgttgtgaaagttggcgttgtgaaagagcaaaaagctggcgaaggtcgtgtggctgtcacaccagaaaatgttaaaaagctggttgatgtaggagcgactgttttggttgaaaaatcagccggagtcggtgcaggttttcctgatgcagattacgctgcggctggcggcactatcgtcagtcacgctcagagttgggatagtgatctcgttgtcaaagtcaaagaacctgacgaggaagaatatcagtatttcaaaccaggtcaggtcgtctggggattccaacatttggcctcctcacctgccactgtgaaagccatgcaagctgccggcacgacagcgatcggcggagaaaccatcgttgaaaatggcgagttggcattgctaaaaccgatgagcgctatcgcaggtcgccggtccgtcatcatgggcgcttattatcttgaagcacagcatggcggggaaggcattttattgccaggcacaccggaagttgcttcaggcacggttgttattttcggtggtgggaacgctgcttttaacgccgccagcttggcattagccatgggctgtcgtgtcacaatcatcgaacttaaaaaagaccgccgtgactggttagcgaagcagtttacaggtgaaaccctgacgctcctgccatcgacgccagagaatctcgccgcggctatcaagaccgccgatgtcttcatctcaaccattctgattccgggcgcaaagccgccgaagttagtcacaacagcgatggtacagtcgatgaaaccgggcagtgtccttgtagatgtagccattgatcaaggcggcacggttgaaactattgatgcaccaacctctattgatgatccggttttcaccaaatacgacgtcattcattatgccgtgccaaatcaaccaggcgcggtaccgcgcacagcaacgatggcactggcagttggcaacatcaagtatcttttggcaatcgctaagtctggaattgatgccgccatcaaaaatgatcctgcgctggcttcaggcgtcaatctttatcacggccaagttaccaacaaaggccttgccgaatcattaaacttaccagttgtttcattagaaacagcgctcaaaacgcaacattaggaggtggataagatgatgaccgcaacgcaaaccgtgagtataaaagatgttcaagaggctagccatctcattcatgaggttggccgagtcacaccgctcattcaatccatgtttcttagtcgcaccgttacccacggtgatgtgtatctcaaactggaaaacatgcagctcacaggttcatttaagtttcgcggtgcttataacaaaatccgccatctcagtgacgccgaaaaagctcgtggtgtcatcacggccagcgctggcaatcatgcccaaggcgttgcattgacggctcacttactcgacattgatgcgacagttgtgatgcctaaaacagcgccattagccaaacaacaagccacgagcggctatggtgcaaaagttgtccttgccggtgatacttttgacgaatctcgtgccttcatggaacaaaaggccaaggaagatggcctaaccgtcgttgacccctacaatgatccattggtcattgccggacaaggctccatcggcttagagattttagatcagctgtgggatgttgataccgtcatcgtaccagttggcggtggtggcctgattacggggattgccaccgttctgaaacattttaatccctatattcacatcgttggtgtccaatcagaaaatgtccacggtatgacggcctcgttgcaagcaggcaagttgacccgacaatgtactggcccaaccctagctgacggcacagcggtcgccatgcccggcgatatcacctttggcctagctgaggaattagtcgatgagatggtactcgtctcagaagaagaaattgctgaagcgatgaaagaccttctccaacgcaccaaaaccgtggcagaaggcgccggtgcattaccaacagcggctctcgaggctcacaaaatcgcaccgcaatggctagcaggcaagaaagttgttgcacttgtctctggtggcaacgtcgatttggaacgggtagcagataacattgatcatttctttaaaagtgatccgactgggcacttcatcggataaaaacagagcgtgagctagcgcggtttctgaactagctcatgctctcaccataacgcgctcgccagcgctgaaacctgcgctggctcgcgctcactttcaaaagggggggaagcaccatggaaaagacgttttcgaagcataccgttgccaagacacattatgtgccatacgcaacggatggtgccaaggaaaatagcggcggcagcacagcgatcatgatcatgggcgccattttggcaacgatcttcgcagcatctaccgcctattcaggcatgaaagccggcctaactgttgctgctgggattcccggttcgattatcggttccggcatggtcggtgtctttgccaaaaagaaaggtatttttggcaaaaatcttttgcaaggcatgagctcaggtggtgaatccatcgccagcggcatgatctatgtcttgccagccattatcattattggcggaaaagtcaacttcttcgcaggcatcgcagttggcgctttggccgtattgtttgctgtcggtgttgcgagtttagttgaaaactacttacttgtcgaagaaaacggcaagctgatgtacccagaatcgacggctatctccgaagccttagatgccagtgaagcaggcggcgattcgcttaaacatatgggcatcggctttggcatcggcggtatcatcactttgctgaccactcaggttttcggctgggtgaacagcgtgatgaccttcgtcggcaactcgtcgtatcgctggaaaatttcaactgaggtcaatcccatgctagccggcatcggctttgtcgttggcttggatgtttcgctcaccatgttcgccggctccattttagcgaacttcgggatcaccccgctcatcgcttatttcactcaaatggctggtggcggtgcccatgtttggaatgacacccatatgttgatgtctcaaatgaacatcgacatggtcgctggctcctataccaagtacatcggcgccggaatgatgctctgcggtgggatcattggcgccattaaattgattcctgtcattgtcacttccattaaaaaaacattgaatgcacgcaatgatgtcggcgaagaaaagaattcgctcggtgtggtctccctacttgttgctgccatcgcgatcttcatcgtcggtgctttcttagctggcaacatcgtgatcgctatcatcgccggtattttgtcactcgttttagctttgctgtttgtcatcgtttcggcgcgacttgctggcacaattggttgttccaatgcgcctgtatcggggatgaccattgcaagtctcgtggtcatgaccctcgtgtttgccttaatgggctggaccgccaacgcgcataatgaaatccttttgctctttggtgtcttcattgtcaccgccatttcagtcggcggggcctatacccaaacgcaaaaagttaattatttggtcggtggccgccgctccgaaatgatgaagtatttcatgattgctgccttgatcggagttattgttgtcgttggtacaaccgtcatcctcgccccgcaactggccattaagagtgctaacccgccattcggtttaccacaagctaacctgattgcgaccctaactactgggattctctccggtaatctaccgtggatcatgatcatcgtcggtatcatcattgcgattgtctgctggatgcttggtctctccatcatgaccgttgccttaggtttctacctgccaatctccacgacatccattatcctcgtgggggccttgctcaaattattgatcgaaaaactgacaaaagacaaggccttacgcgaaacccggttatcctccggtgtctcgctttccagcggtttaatcgcgggcggttccatcattggtctgatcgggattatcctgcatgtcactggtgtgttatccaatcgtgttcctgcaggctttgctggcagtaatggcatggctgtcatcttgctcatcatcatggcggcaagcatcgtcatcccactgatgcgaatcaaacaaccagcgcgcaaggctcaaaagcaataaagaggtgtgacacatgaccgcgactgacacattacaacatttgatttatgaaaaaaatccagcaattcagtacactaaaaaaggcggaaaaatcacgattatccgtccacagaatcacccaatccaaaaattctgtcggcattatctgcacatgaaaattcctgccgtcagttacctacacttagatgcatacggtagttttgtgttcagcaagatcaatggtcatcgcagcgccgccgttattggcaaagaactagccaagaaattccccgaagcagacgatcaccgcgatgaccgcctgatgatctatttgaaccaaattgccaaaaatgaccaccttattcagcgtctcaacgcaaatacacgataacgcgctcgcagtcgcagaaacctgtgcatagggaacttgaatccaatggccaagttcgggccatttggattcaagcccgcttatgctccggtttctaaacgctcctgctcgcgctcaactattggaggaaatcaacatgattgatcgtattgaaatttcagcttgcacatccatgatggtcggtaaaaaagcatcccttgacggcgcgacctacatctcccgcaacgaggatcgcttagtcgcaatctatccaaaacgttttgtggttcaaccagctgtaactggccgcaaggaaacttatgtatcgccatataacaacctgactgtgccactccccgaatccgggtatcgttacacatccacgcctgatgctgaccaaagcgccggaccaaatgaagaagacggttttaatgaaaagaatgtcggcgaaagtgctaccgaaagtgtttatgccaacgaacgggtacttgcttatgatcccttcatcaaaaatggactcgcggaagactccatgacaactttagtgttaccgtttatcaacagtgcccgcgatggcgtccggtatctcggcgaactggtcaaaaagtacggttcagctgaaggcaatggtgtccaatttaacgatcaagacgaagtttggtatatggaaattgtcaccggtcatcaatgggttgcggttcgcattcctgacgattgttacgcagttgctgccaaccaaatcgcgattcaggacattgatttcaatgatccggacaactatatgtgggcagatggcattcaagatttcgtcaaagatcacaacttgaatcctgacgccgatcactggaacttccggcacatttttggcaccgacactgaaaaggatcaccactacaatacaccacgggtttggttcgcccaacgctaccttaatccagaaattgagcaggatccggaatcagctgaattgccattcattcgcaaggccaaccgcaaaatttccgttgaagatattcagtacattatgaaatcccacttcaatgaaaccaaatttgatccgttgggtcacggcaatgaacacgaccgcaagacttatcgcgctatctcactttcgcgcacggccaactcgcatattctgcaaatgcgtgatgccaatcaaaatggcgcagccggcgtccaatgggtcggcttcggtatcccggccttttgcccgcacgtaccgtttttcaccaatgcaaccgatacggataagagttatagcgagttcccaaagaagatggatctgagctcagcttattggctctatgaagcgctcgcgatggttgtcgaatcgcattatgctgagttcatcgaagacgacttagcctatcaaaaagatctcaatgaatgggcacgtcgtaaaattgctgaagttgatcaagctgccgccgggatgagtggcgatgacttaaccacgtatctgactgaacaaaatcatgccattgccaagcactacaatgacacaacccgtgatttcctgttcaagctcatcacgatgggcactaacttatcgaagctcaccttcaagatggatccgaatctatagtcttaccaacattcaaaaagacatcgccgcagcagttactgctaaagcgatgtctttttgaatgccgcttatttgttaaaaaattgccgctacaacctcaccgaattttatgccaagccgcagcactttcagaagggaaaatatgggccatttgccacatttgttgcttactgaagtggaagacaattgctggtaataaggtgttgatcgcatcttccgcttgggcactgaattcagttgcgccaaccaaatgatgatcccgatcaaagatgaggatgctatcgcccatcgtttcctgatcggtttgatggtaccagtcatcgggaatatgattgcgaacaacttggtaagcgccatcagcagcttcttctgacgtcacgccaactttcgcaattcgcggagttgtgtacacagtcgatggtatcgctggatagtcaatgggttcggttgtctggccgctgagcaactgatacaggtaataggattcgaaagtggccgttggggtcaacttgggttgtggcttgtcgagcacatccccggacgcgaaaatgttcggcacattcgtccgcaaatgatcgtcaaccgggatgccgcgttgactaaaggtgacacctgcagcttctaacccaatttgatcatcattaggaattcgaccagttgcatctaacacccagtcaacttgttgttcctgatgatcgccatattggatcgcaatgccttgcgccgtctgtttcaatgcctgcacgtctgcacttgggataaacttgacgcctcttttggtcatgtctgccatcaccgctttgacaaatggctggtgaaattcgcgcaacgctttgtctgcatgcatgaagacgctgactacagctccggcagcattggcaatcgtcgcaaattccatactgatgtaacctgatcccaaaatgccgattcgttttggcaatgttttcaagtccatgaacgcgcggctatcatgtgctaattcagttccggggatgtcgaggtgatgcggacggcgcccagtagcgatgaccatgttttcggccgtataagttttgcccgcaactgtgatgctatgcggatcaatgaatttcccatgcccgtgaatgatcgtcacgccggtttgtttgaggttactgccgatatttgtcggcaacggtttgatcactgcttgtttatgtgccactagctccgaccagttgatcgtgatgctgccggacacgatgccttgcatgcgttcggccatacgttgcaacacgaccggtgtgtccagcgtgatttttgcgttacacccataattagggcaagtgccgccaatcatgtcgctttcgatcacgccaactttctttcctgaagccgctaacggtccagcaccatcgaacgcgccgtgaccactacctaagtacaagacatcaaaatcgtattcactcatattgatcctccttgtgcagtgcgtctgtgacaacggcttaagcataacagattgacgacgactcggtcacggacaatgatttttattttctgataaactgctcctagctcataagccaaaaagaccaacaatttcccgctgtacagggaaattgttggcttagttgatggctattaatgaagtcctgtcctgtttctgatactaattaaagatcgcgacttgcctgtggttttttgacttggaaggcaacgatgagtccgatgatggcaaggattaagacgaacataaagccaaaatgcgaaccaattgtcaggccagtttgtccagcggctttggccgaaccgagcgcgagcatacttgtggcaacagcagttgaaacggcgccgacaatttgctgcagtgtgttcagcaaggcactgccgtctgcgctctcggcaccgctcaaactattcagcccatatgtctgggcaggtgacatcgctaacggcgcgccgatcattaagacaacatgccctaaaataatccaccataacggactttgtgcaccactattaagcaatatcaacacgcctaggatagcaatgacaaaaccaccgcgggataaccatttagcaccgtggctgtcatacatccgacctgcaatcgcagaaacagcagcgttcacaatcccgcctggtaacatgacaagtccggtcatggcaactggcaggcccatcacccgttgcagatacatcggcagtaaatacatcgaggccagaatcaccccaaaatcaagcatgacgagtaacgttccgatagtaaactgtttattagcaaaaacgcgtaaattcagcatcgggtttgttaacgataattgccgccgggcataaagaactaaaccgataaccccaacgagcaaagcaagtccgacttccagcgaaagccagccagcatcactcgccatcgttgtcccaaccacaatcccagcaaagccaatcgacgattcaacaattgacaaccagtcgactggtgtttgcgtttgatgataaacattttccatcgaagttaatgtgaaaatgaaagccaaaaccaagaatggcacgaatagccaaaaaatgtagtgccaagtgaatttggcaagcaccagcccggtaatcgttgggccaatagcaggcgcaaacataatcaccaaagcagccatccccatgactgtccctaatttatatggcgggaaaatctgcatggcgactgaaaacatcagcggcaaaatcagccccgtgccaatgccttgaatcaatcgcccaataagcacaaccggaaaaacagcgcccatcgcagacacaaccgagcccagaataaaggcgccaagtgcaaaaagaatgatctttttagtgttaaaccattttgataaaaggctggataacggcatgcagatcccgataaccaacatataaccagtgactagccactgaatagtgccctgtgacacattcaacgccgtcattaaactaggcaacgcaatattaagcgacgtctctgaaaacataccgacaaacgccccaatcatcaagccgatcatggccattgctggatgggcaacgtgaacgcgagcttgcggcatttcttttgtttgtgataattgcatgataacttccttcttagtgagcgcgagccagcgcggttagcaaccagagtgtaagtggccttgggcgtgatggtcgcactttgaccattgcgaccaaggtccttacatgcaggttgctgcgctggcgaacgcgttaaatgataaaaacaaacaactggcattggctttatgcggccaatgccagcttgatcaagcgggtcagttgatccgcggtctgtcgcaacaagtcaggattgtctttggttgcggcaagaataatggcgccctcaatgctggcttgaataaattggccaagtggctgggcacggtcaggcggaataccggctgacgtgagctttttgatgtacagcgtttctaactgggtaaaaacagcgctgcaagcggcctgcaactcaggatcatcgcctgtttctaaggctatcaagctaattgaattaccaccaagatgccctttttcctgcatttcggtcgccatactttctagttgtccagccagcgcagcgtcaggcgccttataccgatcaaggtcccgttgcacatgctcaagaatgtgctggccagcataagtaatcgcggcttcaatcaattgcgctttaccgtttggaaaataataataaagtgagccctttggtgtaccactgaccgttaaaatctgcgccaaaccagtagctctgaccccttctttttgaaagagactggcagccgttgccaccagtttttcgcgtgtatccatttgctacctccgctattataacaaccggtctatataatactgcttattttctgaaaatgtcaattttatttttttatgcatgaaaaaatgaccttctcatcagaaggtcactttgcaaaacgattattaacctaaatccgttccattggaagcaatcacccgctgataccagttaaacgattgctttttgtaacggtttaaactgccttgcccagcatcgtccagatcgacatagatgaagccgtaacgtttcgacatttggcctgaagaagcactgaccagatcaatgcagccccatggcgtatagcccatcagatccacgccatcatgaatggccgcatccatttgttcaatatgctgcttcaagtaatcaatccgataatcatccttgattttgccatcagcatccggtttgtcaacggcgccaagtccattttcaacaatgaaaagtggtttacgataacgttcatataattgatttaacgcgatgcgcaggccaatcggatcaatctgccagccccattcactcgccctcaaaaacggatttttgatgccactaagcaggttgcccccgacttcagcatgttctttttcaactgtttcgactacggcggacatatagtagctaaaaccaatgtagtcaaccggatgatttttcagcagtgttaattcttcggctgaaaaatcaagatctgtgaatttaaacccgttgtccgccatcaaagcgtcggtataagctgggtactcgccgcgaacctgcacatcgccgcaaaagaaattaaatgcctgattttgttgcaaggtcgccaattgattcactgggttggcatcatagctgtaagtggtggcataaagcaacatgcagccaacttgaagtttaggatcaagcgcatgcccgattttcacggcccaagcgctggcaacaaactgattgtgccatgcttgaaaaattgtttgcttgtcattgccgccattattggcaaccaatccttggctcatcaccggaaatgcccatgcactgttaatttcattaaacgtcatccaatactttacttgcttaaagtagcgagtcaaaactgtttccgcaaaatgcttataaaactcgataagacgtttatttttccagccgccatatttggtcaccagatgcaacggcatttcgtaatgtgaaatcgtgacaactggttcgatatcgtatttcaagcatgtcgcaataacctcatcataaaatttcaagcccgaggcatttggtgttttctcatcaccttctgggaaaatccgtgaccacgcaatcgaaaaacgatagcatttaaatcccatctcgctgaaaagtttgatgtcttctttaaaccgatgataatgatcaatgccttgatggtttgggtagcgatacttgcttttgtcgatggtccagttgaaatctggccgattcacaattgcaaaacgatccttgccttgtggtagcacatcggcgactgaaaggcctttgccatcttcctgataagctccttcaagttgattggctgccgtagcaccgccccataaaaaattcttcggaaaatttaggtatgtcattggtctgctctccttaaacacgcccccagccgcagaaacctgcgtgtaaggaccctgaccgcaatgaccaaagtccggtcatcacgttcaggcccacttacactccggtttctaaccgcgtctgctcacgctcttttaaaacgccttcactggcgcagcgcggctatgcgaagaacattaaaggcaacagccggtcacccttaatgccgcttcgctacgccgcgcttaccgcgccagttcacgctctttacgctaatgtcatgaccggccgatcatcggtggctccttgtccaagcgtcgcgatttgatactggtcggaattggtcacaatcatcatcacggtactttcatacccttctttttcaatggcttcgtgatcgaattgcaccaacggcgtcccaatttcaacgtgttgtccttgtgccacaagtggttgaaaatgtttgccttttagattaaccgtatcgataccgatatgaatcaaaatttccgagcctttgtccgactgaatcccaatcgcatgaccggttggataaagcagtctaatcacgccagcaacaggcgccttcaccatgccgttttcaggaacgattgccacacctttgcccatggtctcagatgcaaagacctcatctgccaagccggttaacggcacaagcacccctttgactggtgctgctaacgcttcgcctagttcgctgttggcagaaggcgctgttttggcttttgcacctgcgttgataccgccaaaaaagtaagtgagcaccgtcccgagcgcgaacgcgaccacatcgccaaccacagaaagtccaaagcctttgccaataaaagttggcagtgaaagcacactggccaaagcagcggcatttgccccagcaccggaaatcgccacgatcataccaccgactgctcctgccacacaggcaagataaaatggctttttcaacttcaatgtaatcccataaattgtcggttctgtgatcccgaatagtgcggtaatggtactggaaccggcaagacttttcattttggcatcacgcgttctaagaaataccgccaatgctgcaccagcttgagacagcactgctggcagcagaatcggcatcatcaaatcggttccattctgagcaatattgttcatcatcaccggtaccagtgcccagtgaacgccgaaaatcacgatcacttgccagaaaccgcctagcactaggccggctaaaattggcacactcttgttcaacgacacaatcgctgttgccaaccaactgctgaccgtcgcactgatggggccaaccacaatcagcgtcaatggcacaatgacaaccaaaagacaaactggcgccaaaatgttacgaacggattcgtgccacaacttgttgaaaactggttctaagaatttctgaacaacaacaaccagcagaattggcaagactgtcgcggtgtaattcgccggcacgactggaataccgaaaaagtcaatagttgttgcctttgcgcccaacgcgacaatgcccggcgacaccatcgccgccgcaatcgccatggatacaaattgattgactttgagttgttttgcagcggtaaacgctaaggcaatcggcagaaaatagaaaataccatctgctgcagcccaccaaatttgatacgcgccgcttttcgctgttaaccagcccatgaccacggccagtgatagcaagcctttcaaaatccctgcaccggccattgcgcccaagaatggcgtaaatacaccggaaatgaacgttagcaagctgttaaaagcgcttttgaacgtcatttttccttgtgcggctgtttcaccgctagtttcgccttcgcttaaagatggttccagtttcacgacttcatggtaaacatccccgacattgttaccaatcacgacttgaaactgaccactggcttcaaccacggtgatcacaccatccaacgcctcgattttatctttgggtacttttgcacgatccttcaatgtaaaacgcagacgagtggcacagtgccagacctgattgatgttttgtttgccaccaatcagatttaataattgctgagctaatcctgattcattcattcggccttccccctttagctacacatagctacacttgcgattcccacagcgagtgatatggttcagtatcttgcatcacgatgactgcacttcgctgtctggtgttgcattctttcttaaacgcgatcgctagcctacttacactccggtttctagccgggctagctcacgctctttctcaaaacgcgttcgctggcgcagaaacctgcacataaggacctgaagcctaaatggtccaagcccaaccatttaggcttcaggccgcttatgctccggtttctaaccgcgccagctcacgctccacaaaaaaagccagaaagaccggacttgtggtgtacaagtcgtgtctttctggttttgcctaatccaatagttacaagccagatggttctgtattcgctttcaacgacaccatcttatcgtacgcattagcacgcgtcaacaacttttttcactccgccaaactttttgctaagcgcgcaatatgcatggtgagatagatttgctcgtttttaggaatcgcaatcgctaacttctgttgcatgaatcggtcaacgtcttccatacagtgataagcacgggcataatcttgttgaagatgtttcaacaagacatagtcatagttttccatctttaacgacaaaggcgacggcgcagcagcatacatgcgttgtaagaaaaatttgaggtgaataactagtcgctgataatcaggtgttttgacgttcatgtccagccctagattgtaaaaggtagattgtaaaattaatccgaacgctgttcggacaaaaaagatcagcttcctttaaaatggtgtttaccataaacccatcttttaggagctgatcttttgtctagtataacctattccgaacgaattaaaatcgaaaccttttgtgaactagggctgtccaatatccaaatgggcgttcggctgaaccgatcaccgtcaacaatttcttatgaattatctcgatgtcaaccttatcaggctgaattagcacaaacagatgccgaatacaagcgatcacgatgtggtcggaaaactaagctgagcgatgagttaaagcaaaaaattctcaaccatttacgtctaagctggtcaccaggaatgattgctcacgaagttaaactagcgactaaatctatttataattggctaaatcaggggagaattgatttctccttgaatgatctacctgaacatggcgtacgccaacggcgtaacgttgaccaacgatccaaatataatcaatctttggggcgatcaattgaacagcgtcccatgatgattaatcaacgtaatcgcatcggcgattttgaactagatacagtcgttggtcctcgtgggcatagtaaggcagttttattaactttaatcgatcgaaaatcacggttcctttgggcataccggttaaaagatcggacgacagcgactgttaatgaagcactaactaagttcctaaccacttttaatggtccggtgcacagctttactgtggaccgtggcactgagtttagtgggctagtatcacttgaatcacaatatggtattaaggcctattactgccatgcttatacgccagctgaacgtggtagtaatgaacgctttaatcggaatttacgttatttttatcctaaagggactcgttttgagcacattagtgctcaagatttaacgacgacgttactccaaattaaccagcgaccgcttaaaatactcgactggcaaacaccgtatcaggttatgctgacaaatttgtccaaaaattcggattaaatttgcaatctaccatataagctgtcagtgttggtctctgtccgtgacgtgttcggctcaacttggtaacgtttaaccgtcccaatcccccagccaaaaccgccaataaaaatgataatgagtaccaaatcgacaatcaaaatcatgagattttggcgattcaattttttcttcccatccctattcaaaatacgttcacccttcacgttctataatcgttatatcaatgtcatcattatagcaaaccttgcttctgatccgcatcacatgaccttttgtttaacaaggtttccttataaggtaatcgagtcattttaatgttcgaatgaatgatattattgttataatttatacaataagttgcatatacaccgtttgggaggggatatgaatatgaaaaaaatcttgattggtattggcatcttcattggcctcgtctttcttggtggtgcaggattttacgcttggtatactcaaagcaccccttattacacccagattacgacgacaggcaagaagtttgatgttatcgatgatgagaccggtgctgcgcgggatattgattatgcctatactcagatggcctatgatgaaaaaggccacggtacagaggttgatttcaacggtcacaaatctcggcctttgaaaatgcaagcttatctccgcctcgattacagcacgcgtcgaaaccaagtgattagttgggaagccgtaccaaaggaaaaggtgcctaaagcagctttagcaaaattaaatcgctaattaaaaaaggtgcgctggcgcagtttgaaacctgcgccagcgaacacatttacaaggagatgtctattatgacgaatgaacacaaagttttacgcgggttgtcttatatttcggtcatttttgcccccattctctttccaattctcgtttgaattttcaccccgcaaggttccgttacacgggacacagctaaacacgcactttggctgcatattattcccaccctattgagcatttttatctttatgatcattggcggtgtcggtttcttcacaaacagcatcaacgcaacatccgccgtttcacttatcttgctacttgttgccatggtcgttgacattgggatggtagtctacaacatctacacaggcattaaaattatcacctcctgattaaccactcaatatcgccaaaaaagggcgcctctcgtcatgagaagcaccctttttggtttatcaaaatttcaccgtagccccgcatccaaagcatacaagttctgataccgctcgtcgttcttagccaagtgactaggggtatcattcatcgtcaaacggccatcttcaagaaaaatgacgcgatcagtttgattgacgccttgcaaatgatgcgtcacccaaagaatggttttgccttgcaatactgtgaacatcgtctccagcaaagcctgttccgtaattggatcaaggccgactgtcggttcatccaacagcacaatcggcgcatcctgtaaaagaattcgagctagcgacaaacgttgccgttcaccacctgaaaagccgaaacctgcttcctcgacactgctgttaataccattcggcaattgggctacgagctggtctagcttgactgccttaagagcagcggcaacatcagcatcgctggcctgctcattgcctaagcggacattgttgacaatcgacgtgttgaataaaaacggactttgatccaacaccgcaaaaagattggtgcgatgctgctgataagtcaggacatcttgactgtcgaccaacacgttgccagctgtcggcgttaggtcaccaagtaccagttgcaacaacgtggttttgcccatgccactgggtccgagaatcgcaattttctcgccgctgtgaacggttagatcaatatcggtaatcaattcaggatcttttggcgtgtattgaaaactgagatgctgcaatgtcatctctttgaactgagtcggtactgcttgttgttgcggtaattgtcgcgtgaccggctgcaaatcgttgagatgacgaatcgcatcgcggtatgtcggccattcgccaaccccttgtgcgataccggaaaacgcctgatcgagtgggaaaacaaccagtacaaacgccccaacccagttagcactcgcttgattaccggtccactcaaggtttgtccagatcaacatactaatgacaattaagacaaacagcagttggccgacaaagtctcggcgccattgaaaccgcttggacttcaccgtcgatgcggccaattttttaggcgccgccagactttgagacataaaatccttttcgcgatgagtaatgacccaatcggacaaaccgagcactgaatccgtcaatgagacataggcatcatgattcaattgcttttgttctgcttttcgaaaacgctcaactaccagtccccaccaaggcagaatcaatacttgaaacaacagcaacaacataatccatagtgcaaagccccagttgaaccagcctagcaacaaggtggcaataaccgttagaccagcgccgaccacagttgggaaaatcatccgcaagtatagattctgaatgtgaccaatgtcatcggcgagcaagcctagaatatcgccggtttgatgatgttcggacacaaaggcagcatcagtttccaacactttgtacaattttcgccgcatgtggctagtaatgcgcaacacccagttgtgactggtcaaccgttcaatgtattgaaacaccggtcgcccaatcccaaaagcgcgggtcaagacaaccgtgacataaatagctgcaaacaatggcttcgtggcacttttatcaatcagaaaacctgacgtgaacatcaaggcaccagcaaagacaaaggtcataacccccagaattaacgaccagaagagtaagccgcgatagcgtttcaagtctgggcgaacccagtgctcatttttcaaccaatgcattgaattcacctcgcatttcgtgcacaagggcctgatacggcttagaatgtgccgccagctcacttggggtcccttcagcaatgatcttgccgccatcaaccacaatcacgcgatccatttgattgagccagtgtagccgatgggtcgcaaaaatcacgagccggtttttgaacagcggcacaagcgtttcttttaactcggcttcagtttcaatatccaaatgggcagttggttcgtcaaacaaccaaatcgagcgattcgtatcaatcaaagtccgcgccaacgcaattcgctgggcctgaccgccggaaataccacggccgccttccccgattctcgttgcatagccgtctgccaaagtttcgatccaatgactcaaccccgccgcctcagctgcctgtttcacatcttcatctgacgcatccggccgataaaaccggatattggcagcgatcgtatccgcaaatagatacggatcttgtgggatataactcaaatgatcttgccaggctgcttgggtcatatgcggtaccttcgttcctcgaaccgtcatggcagctttttgcggctgcaagaaaccgccaatcaaattgagtaatgttgatttacctgacccgctagcaccgataatcgctactttttccgtgccggtaaactgcagattagcatcttgaatgcccgcgcgttcatttggataggtgaaatcgaggtggttaatggttaccgtatcctgagcctgccaccttgaaaaagccggtaacacattggtatcagtaggtaatggctgatcaatcacttgccaaatcgccttcatcgcatttttgccattcaaggtggcatggtagtcagtcccaaaatcacgaatcggcatgaaatattccggtgccaagatcagcgcaaccattgctggatagagtggaatcgcgccatccatcaacttgatcccgaggaaaaccgcaacaactgcaatcgacaaggtggtgaagaagtctagcgcaaacgttgagagcatcgcgatgcgcaagacgcccatggtttgtttccgatagtcttccgacacatcgtacacattattcgcgtattgccgactaatccccatcaactgcaaagtttttaaaccacgcaaggagtcaatgaaatgattgctcatcttttgaaacccagcatattggctttcagatttatcctgtgctgccaagccaagaatcaccatgaacaaaataataattggaaacatgatcagcaaggtgaagccagttagccagttttcgtaccaaatataggcaactaaaacccacggaataatactcatgttcaggattttgttcaaaatcagttcaatataattttcggcttcgggaatgccatccagcgccatcgtgaccaaattaccggttccttccttggcaacggcagccggccccaaggcatacaagtgcttgagcaattgggcttgtagccaggccgaactagtcatggcaaatcgtgccccgatgcgattgcgcacccaaacaatgagctgacgaatcacaaaggcagtcgcaaaaagtcctaacggaagccataagccagctaaactttgccggttccaagaatgaacgatcccttcagcaagaaatttcccttgtaataaaataacaaaagcttgcacgagcgcaaacccggcaagcattgtcataattcgtttcattcccgaaaggcgcatgagcgtcttatcgatcattcactaaccgctccttttgcttgaatccgcttgtggaagaccacatagctccagatgaagtatgccaaggcaattggcagcagaatcacagcgacaatcgtcataatggtcagcgtcaacggactagcactggcgtcttttgccaaaatggacatagccgcatcttggccaatcataacgcgtgggaacaagccgttgaaaatcacaccgacaaccccgacaagccctagggcactgccaacaaatgacaacacttcattatctttaagcacgccaacatgagcggcaactgtcgagccgacaatcacaaccaaaatcaacaaagtgctgattgggcgttctttgaagaagtcggtcataaagaatagaaggacagcgaagacaacttcaccagcatacaacaagtagtacaacttgctgttccagtcacgcgcacgcttgcgcaagtcgccagtcgttttcagacgaataaagtttaaaccgtgcatgagcatcatcaaagtgaccgcaactccgccgacaattgtcaaaaggttgatttgattacctaaagtaggataaacatcgccagccttggtaattggtaacggttgaatgatcgcggtaaaaatcatccctaagatgaacggtgggattaaactgccgcaagctaaagcccaacgccagatattccgacctcttttggtctcggcatgtgcagcaaattcaaacgacacgccgcgaacaatcaaaccgaacaacacaaggaagaacatgatgtaaaaccccgagaagaggctggcataccacattggataagaggcaaacatcgcgccaccagctgtgatcagccaaacttcgtttccatcccaatgtgggccgattgtggcaacgagttgatcttcttcgtcagagttacgcgccaatagcttggttgacataccaaccccgaagtcaaagccttcaaggacgaagaagccgctgaaaaggacaaacaataagaagaaccacaaaatctgtaaccagctcattttgcgaacgcctccttagcaaacggatcactgttgaccccgtagtcagtgttcagatcgccttcaggacccttcttaagcacgcgatgtgagtaataaatcatgacaccgccgagcaaggtgaagatcaagaagtagcaaatgttagtgaacagtaactgtccagctgtcgttgtcggcgaaaccgcatcggcaattgaatacaggccgtaaacaacccatggataccgaccaagttcagtgataaaccaaccagccgtattaatgatgaatgggagccacagcgcaaagccgagaatatacaatagccaacgctgattaagcaaggtatctttcttcttccggctaaaccagagacctagaacgccgagcaggaacagaagaacgccaccaccagccatgacccggaagctccagaacaaggttttaaccggcacataatagtccctgtctttgccatatttagcttgaagctccttattagctgtctccatgcctttgactgcgccgttcattttatgatacgacagcaaacttaatagatatggcacttcaatgttgccagtggtcgtatgatctttagtattgattaattcgacaagcgtccacggtgctggatcactggtatctttataaattccttcagttgccgcaaacttcatcggctgatctttaatgatgaattgtgtctgcaaatcaccaaaaccgattgcgcatgcagaagcgatggtgccaacaatcaagccaactctaagagacttcttgtaaaagtcaacttgatcttttttaagcaaacgccatgcggccatgccggctacagcaaagccagccgtcgtaaaggcaccaaaaataacatgcggaaattcaacccacagttgcggattcgtgatcacagcaccaaagtcgactagtttaacccgacccgttgcttgattaatcgcaaaaccggttggatgctgcatgaaggcattcgccgacagaatccaaatggctgatagcgtggtacctagccatgtcatccaaataaagatagcgtgaacagccggtttgaaacgatcccatgtgaacatccacagaccaatgaaagtcgattccatgaagaatgccagtaacgcttcaatcgccagtggcaccccaaagatgtcacccatgaaccgtgaataattagaccagttcatgccaaactgaaattcttgaataatacctgtaacgaccccaaccgcaaagctgagtaagaagatcttgccccagaacttggccatcttcttatatgtttcattctttttgcgcacatacatcgtttccataatggcggtaacaagccccataccaattgaaaacggcacaaagaagaaatggaaaacggtcgtcatcgcgaactgaaaacgagctagcgataatacgtccattgccaatagcatatgtttttcctcccttactagattgattccaatctaagtatacccctgagttttattttttaaaaaccaaaaacccaaaaaatagcattgaaataatgcttttcagcatcaacatcaaatcaaaactgttatgatatgcagctgtatgcttaattgacggcgtttcggccaccaaacaaatattagctaaaaccattttgaaaacacctttgaaaacgatggaagaatgaaaacgtatttaggggcgaatcacttcttgaatcagcggcgtttttttcggcgctttatcgccaatatgataagcgtttctgaccatgttgctgatagcgtcaacgttttcggtgtcggcatgcagcgtaaccaacgtatcgcctttggtcacaggtgtccccagttttttatgcagaacaagcccaactgccaagtctaaaatatcatcttttttcgctcgaccgccaccaagttgcatcgctgccaaaccgagagcatttgtgtcaatttggtcaacaatgccagattcggcagctttgacagcaattcgatacttagcttgtggcagtttgcgtggatcatccactactgaagcatccccgccttgtgctgtgatcaattgcttgaaggcattcaacgcacgcccgtcacgcagcgcatcttcggctaagccgctggcaatctctagacttgccgccttgccgccaagcaccagcatctgtgctgccaacgcaacggtaagatcatggacatctttcggaccacgatttttaagaatggcaatagattccgcaatttccagactattaccaatcgtaatgcccagcggctggctcatgtctgtcaacaaagccacacttttaaccccagcggttttgctgatacccaccaaggctttggccaacgcccgcgcatcttcggtggtcttcataaatgcgccattgccgactttcacatcaaagaccaaggcattcgtaccactggctaactttttactcatgatcgatcccgcaatcaacgggatcgattcaaccgtacctgtgacatcgcgcaaagcgtaaatccgtcgatctgctggcgcaacctcgccgctcgcactgataatggcttcattgatttgctgtacctgctgcttgaattgggtttcgctttccgcaacattgaagccaggaatgctctcaagtttgtccaatgtaccgcccgtgtgaccaagaccgcgcccggaaatcatcggcaccggcacacctagacacgcaaccagcggcgccaacggaatactaattttgtcaccgacaccgccagtactgtgtttatcgactttaatacccggaatatcgctcaaatcaagtacgtcaccggaatgcagcattgcaaaagcaaaatggctgcgttcctctggcgtcataccattaaaataaaccgccatcagaaaagcactcatctgataatccggaattgcttttgccgtatactgttcaatcatccaagtgagctcttcattggttaaagctttgtgatcacgttttttcgtgattaaatcgaccatgcgcatctctcatcacccttttcccagttattcattccattgtaccgcgtcacgcgccgcctatgttaaactctaaacaatcagagcgtgaactggcgcgtttagaaaccgaagcataagtggcctcaagcctaaatagctgggctttggctatttaggcttgaggtccttatgtgcaggtttctacgccagtgaacgcgtttcagccaagagcgtgaaccagcccggtcagaaaccggagtgtaagtgggcttggatgtgatggtcgggctttgaccattgcatccaaggtccttacacgcaggtttctgggctggtgaacgcgtttaaaagagcgtgaactggcgcgtttagaaaccggagtgtaagcgggcctgaacgtgatgaccgggtttgggtcattgcgttcagggtccttacacgcaggtttctgcgccagtgaacgcgtttaaacagacgcgaaccaatcaccccggtcatgccgaccactctttattgcctgcgaacttgtttaggaggaaaacttgatggactttcaaacattacatcaactaagcaaaaccgaactacattgtcatttagacggctcattgtcgttaagttgcattcgtcagctcgctaaaatgatcgaccgaaaattaccggcgactgacgacgaactgcggcgactggttcaggcaccagcagattccgagaatttaggtgattatctcaaagccttcgacttcgtggcccccttgctgcaaaccaaaaaggccttgcaactcgcggcctacgatgtcgttgaacaagcggctgaagaaaacgtccgctatatcgaaattcgcttcgcgcccgtattttccctagcaggcggattatcgctggtcgaagcaacgcaagccgtcatcgaaggcttacaccaaggcatggcaacatatgacatcatggcgaaggccttagtctgtggcatgcgacagttgcccaacactgataaccaaacaatgtttaaaaccaccgccccgctacttggttcaacactcgtcggcggtgactttgctggcaacgaagctgattttccaacgaacgtgtgcgcgccggccattaaaactgctcaatcccttggcgtgccgcttacgtttcatgccggcgaatgtcattgcccgcaaaacattgctgaagcagtacgactcggcattccgcggattggccatgccaccgcttgttttgatcaaccggcactcattgagaaaattgttgaaactgacaccacagttgaactttgcctcacgagcaacctccaaacgaaagccgctcgtacactcgctgagtttccgtatcaggcgcttaaaaaagctggtgccaaaatcaccattaacactgataatcgaacagtctcgaataccacgttaacccaggaatatcagcgttatcagcaagcttttggtacaacagcagctgattttttagcattcaatttaaacgccattgatgcagctttcattcctgatgccgataagaaatcattacgcgaccagttacatcaagattacgcaacttattgttaattttccccaattaaaagacaagccatgatcacgactattgcttgtcttttttaatgcagttaaccaaggccttgctgatcaggcgcttaatcattgcttaatgaaagcgccacaacttcgtcacgaataaagcccaaattcaccgcacattcatcccgccaaagccacagccccttgttatgctggttttatcaacaaacgaaagaaggatgatgcatatgttgattaatcaaaccgatgtcatcgcaacccaattacaacaaattgcttacccgtatattaacgccattactgaaaccggcgtcccgatcacaattacaaccaatcaaaaacagcgcgatgaccccgccttttggcagagcatcagcgctatcctgaaagctcgtttatgggtacccgtttcaaagaagtaccatgaattaaccgaccatgactggctggcgacaccagaaatgacctaactaagcttgataacttgaaaaggccgtcgcagcaagcaccaaggtcaacacagcatctggtgaaagtgccgcactgactgtctcaatatggccgctggttgcgactgcgccaatcacttcaagcccgtacttaacaatattcaagtcacgctgcggggtatacccaccgtcaaaaacgggttcatgattgtatgtaaaattcaactgatcatttttgattgagccatccacatggttgaccatgatacggtcatgggtggcggtcaatggcgcattgtcatctggcaagtttaacttgtgatcagattcaattgtataataatcggcctgcttcatatgcaagtatttctcagctggcttcttgagcaccttcaaataatccacaattgcgtatactttgttggggtcaagctgggttttcttggccatcaggtcatcattatgcgcctcaagccagtctgctaaattactgatactaaattgatccatgttgtgcctccatattcgttgctaattcttacgccagtatagcatggacttcaagtctggcgaagcgggattgtcataaatttgttacacatactgttatataatagtagtgggagatgaggatgatgctgagcaatcgcgagccatatccaattatcgattatttaggccgacctatcaagctgtcactgtttgtgacctatcgattacgcattaaaaacggctatatccttgcactgcgccgaaatcaacatcagcaagtgatcccgaacctcatggccaagaatgcgagctgattcggttgcggcaacagccactgatgaacggttactaattggctaggatggtgtgtatcaatacaccatccttttttgatggcgccagatgcggcatgatcgctcagtccggggagcgatcttccagcttcggtccatgcggcgtcgccattgccatcatggcgactgtcaaaataataataacgccacccaagatttccgcaaatcccatatgcatgtgtaagaaaacgactgaaacaaccgttgcacccaacggctcaaaggcgtctagcaacgtggctgccgtcggagaaatgaactgcaagctcgcaaggtaaaccgaataagcaatgatggtgccaaaaatcacaatgaaccagtaaccagcccaacctgcgtgatctaaatgcggtatttccttccaaaaaggatcaaatacgtcaatcaacaaaccaccaatcagttgcgcccatgccgtgacgacaatcggcgagtggcggtgcaacaagcctgcaggcaataaggtatacgccgctgccgccaatgctgccatgataccccagaaaaaagcattcggcgaaatggccagatgagtaaaatgccctttggtaacaaccaaagccgtccccatcatggcaaagcaaatcgtcacaatatcaattcggcgcggcttttcgcgcaaacgcagcgctaagaatatcaacacaaccaccggtgacagatattgcaaaatcgtggcagttgcagcattggctactgcaactgccttaaagtaaatatactgcatcccgatcatgccaaacagaataaatagaattagctgcaaggcatcacgagtattccgccaaggtgctagaatcgctttacgctctttccaaaaagccacgagcatcaaaacaattccggcgataatcatcttcgaactaatcagccatgaaactttaatgccttgatcaaataaggcctcgctaattgggccagagattccccaaaagcttgaccctaaaattgctagaaaaattccccacagtcggacgcgcttcaccagtcttgctccctcttgggccgattcggatcagtcctgcatcacaacatgatcatcaattaatccggcgccttgcaaataattatacacgattaccggccctacgaacgcaaagccgttatttttcaaatccttggcgattttgaccgataaggcacttttggtcggaatttccgcacgcgacttaggtcgattgaccaacggcttgccgttcacaaaatgccataaatagtgatcaaggctgccatactttgcctgaatttttaacacagctctggcattggtaattgttgcctcaagtttcttacgattgcgaatgatatcttgccgctgcaataactgctcgacgtcttcttcatccatagcagctacttgtttaatcgcaaaattatgaaaagcatcgttaaaagcagcgcgcttgccaatgactagttcccaattcaacccagcttggaaaatctcaagggataacaactcaaataacttttgatcatcatgaaccggcacgccccattcatgatcgtggtacgcgcgcatagctggtgacattttggcaacccaatccgtataacgcttacgttcctgataccgctgcaatgctgcttctgtcttggcttcttcagcgtgatcatttggttttaccattgtccagcacctccatagacttgcataggcttctcttttacggatacattacgccgcgctggcagggattgccagtgaagatgcttgcaaggcaagatcatgcgttcacgtgtgcaacgctggacaggattgcacaggtgaacgcgttcgcagccacagatgcctacatataaggaacttgaaccgaactggccacttacactctgttttctagccgctcctgttcgcgcttaacaaaaaaaccgataacaagttttgtcatcggctcacaaacaatcacttacctatttagttttaacgatcaggacatcgcaaggtgccgtgcgattgacatattccgtgacagatccgacaaggacgcgttctacagcgttcaagccagttgcaccgatcacaatgagatcattgtgatggtcgtgcggaaaatcagttgcaattaccgtcttgggattgccaaaccgaatgtgaatatcaagatcatccagacctgcacttttggcttgatctttcaaattatctaagtattcctgtgcatcttgcgtcaactgataaaccgcatcgccggaaatcatgccgccgtaactgccaataaactgtttggtatcaagcacattcaaaacatccaagtgggctcggttggccagtgcaaccttaatggccttgttaaaagctaattctgcttccttcgagccatccaccggtacgagcaagcgatcatattcttgatccattccgctcacatccttactttctgattaacttaagcatagaacgccgaggaaacgaatacaagaaataaatttgaacacttaacatagtaatctatcgcaagaccctgtaaaataagactcaacggcaggctttactgatgcgcgtactgaatctgatcgaacccggttattatttattaaaatatgttttatttccgtgggtttatgattgatttaatacgcattaatgctatattaaagttagtgagcttgcattcttgaatttaaggattcggcgccaaaaaaatttgaaagaaatgtggtggaaatatgattacaaatggtgttggcagcgtgctgcgacagatccgaaagggtcgcggcgaatcaatcgttgaagttgcaaaagcaacccatacttccccagctagttttactaagtgggaaaacgatcaaacaattccgagtgaacggagtattcgcaaacttgcagaatactataatacagatccgctcgaattattgagtgtggcttatccggataaatatgctcagaagcaagaaaacgaacaaccggtcggtgatggtccatcaatccgtgttgaggacttgttaggcaacaactcagttctgacatacaatggtgttccgcttgcggcgggcaccaagtcgctggtagcggctttcattgccggattaattatcgctcagcctgagtaaagttattcttcaaggaaagccgtcatttgacggctttttttgtcccttctgatacgctcagtcgacatgccttgtacacgtataacccttgaaaacaatgcattctcgctcactcataaaaacacagcctgatgcccaactagctggaaaacttaaggatgcattgccggtaccaacaactttcgcgtatactggagtcaaacgttttcacgatggaggaattaaatttggaacccaatgttcttgacattaaaaatggacttaactttcgcgacctcggcggctataagacaaaatccggtcaattagtcaaacctcagaaagtcattcgctctgctaagttgagcgagttatctgaccaggatttgcaatacctttccgattacgggctcatcgccgatgtcgactttcgctcacccgaagaacaagcagctgagcccgatcgatacccagaacacgcgacctaccattttgtgccggttttcccaacagacgaaaccaagagtagtgaacaggcggatgccttgcaaaagagcttctcacgtgatccgcacgcaggttttgaaaacatggttaaaacctacgccgacatcgtcaaaatgccttctgcacaaaaggcttatcgtcaattcttcgacatcctcttaagtaacgatgacgaaaatggtgctgttcttttccattgcacagccggtaaagatcgaaccgggatgggcgcggtatatctactttcagccctcggtcttgatggtcataccattcgccaagactacctcgcgacaaacgatctcattcagccgatggtcgaaaagaatttggcagctgctcgtaagcatggcgcaactgatgctcttcttgccaacattcaagatctcggcacggtttcgggtgcttttcttgacagcgccttagccacgatcgatgctgaatatggcagcatgcgcgactatttgcaagatgaattaaagctgacccccgctgaaaaacgggatctccgcgaactttatctacagtaaaaagctacgcgaatgagttacaacagttgatggctcaatcagacaatatctttgagcacatctattaagaaactgggaaaacacctctgttgagtcccgcaagcgcggtgttctttgacaggcgatgtttcagtcccagtttcttttttaattatgcgtgagcactttctgcgttcttaacgatactgataacaacaaaaaatagctaaatttaatcggcatctttgcgttcccactctaacttggctagaataatgacatcaatgacgttaagaggtgaccgggatggatttaaaaatgatgattaaagcccatgctaaagagttgggaatcgacaaaattggctttacgaccgctgataattttgccgcgctcaaacctagcttgctcgcacaaaaagcggccggtcacacgactggctttgaacatcaaaatatcgatgaacgcctatatcctgataaaatttttgaccagccacaaagtataatcgcaattgcgttagcgtatccggctaaaatccatgaacgaccgccgcgaacaggacccaaacgtggccgatttgcgcgagccagctggggcattgattatcacactgtgcttgatcgaaaaatggcgtcacttatcaagtttattaaacgaacggcagaaaatgatcctaacttgcgtttcaaacccatggtcgatacaggtgaattaatcgatgttgtcgttgcgcaacgcgccggcctcggctttatcggcaaaaacggtctactcatcacccctgaatttggttcgtatgtgtacctcggtgagatcattaccaatattaagtttgctcctgacgaaccgatgacctcacagtgcggtgattgtactcgctgtattgatttttgcccgccaaaagccttgcttggtgacggtcgcatgaatggtcaacgctgtctttcctatcaaacccagactaaaggctacatggatccagaatttcggcccatgattcgcaacgtcctatacggctgcgatatctgccagcaggtttgtccgtttaataaaggcaaggattttcatatccatccagaaatggaacccgacccggaaacggtattaccggaactgattccaatgttaacgctgaccaacaaggactttaaaacgcgctttggcaaactggctggtgcttggcgcggcaaaaaaccactgcaacgtaatgccattatcgcactggtcaacctgcatgaccgcagcgccattcctcacttgctcgaggtcattgagcatgatccgcgaccaatgattcgagcaactgcagcttgggccgttggtgaattacagccatcgtctaatcctgaaatcgagacctttctcaaaacggccttggcaaaagaaacgacgccagaagcgcaagtcgcctttcaggatgcacttgatcacctaacccaacattgagcatgttataatgactcttaagaatacgaggtgcctatattgaaactatatcaaggactcactcaggtgcaggtcaatgaagaaatggccgatgatacacctgacttcaccattaccaccgatctaaccaaaccgttgcactactcaccatcggaactttaccactacttggatgcggtcttaaaacccggtagccggcacgatcagaataatctgaagtatgtcacggatgctgccttcatcggcgaaaattttgatttcaactcaatcccttacactgctaagttaaaggattttgaagaaaaaatggcatttgctcgcaaccttgtcagtgatctcaatcgtcacgtcagcgtcaatctgaatacaaaaaatcatacttttgaacttttattcgttgattaagaaaaaaggctctgcgtcaactggtgttgaagaataaatttatcatttgaggcggttctccatttggggagccgtctttgtcatgttatgccgtgatttggtagattcgtttgaagaagttcagctgattcttgaagccaaaacaggatcgtttgagtgacttgatgaggcggttaaccccttcgatcggaccgttggaataagggctggtgacagcggcgagaacagcgactttgtgtcgcttaagcgtcgcgatcgtcatgtccattgccgtaccgtttggctcgtaagtagctaacaggtttgccagttccgcgggatgtttcttcaccatcaaagcatcatgaagcgctaagtaggtctcgtaggtttgcttgagcttgggctcagtatcaagtgcgatatcgatggcctcctgttgcgtgacgtattcattcaaaccaaacaggaactgtttgtgtttagcgtcaggcgcggtttgatgaaaaagccgccagtttgtcttcatgatcttataaggacggctgtgtttgtcatcaagctgtttgagcgcttggacgcgtacctgatcaagggcacgagccgcaagttgaatgatatggaaccgatcaatgacgacttgggccttggggaaaacctcatgaataatcgtctgataagctgcattcatgtccatggtgaccgtctggacccgagtgcggtcagcgagtgaataatgagcgatgaagaagtttttaatcgtgcggttgaatcgatcaccaagcaaggcaatcagacgatgtgaatcggcatcaagacagataaacgacatcatgccatgagtggaacggaactcatcaaagcagagtcgcgtgggtagccggcgagccggtcggagtttgagattttggtcaatgatccgttgaaccgaggaggctgagattccgataatacgggcgatggttttgactggcaaccgttcatgcgctaacttcatgattcgctctgtcatgtgagcggcgatcgtgtggttgggttgcacgagtggcgtcttggcactgactgtgtggtaacagttatgacagcgccatcgttgcttgtgcaagtcaatgactgtcggcatttcaaccccgttgaggacgcgcacgtgggccgtgtaaaacccgttagggtgcaaggcctcaaagccgcacagtgggcaccgggttaaccggtaagtcagctcggcatcaatcacatgatactggcggcgacgtaccccgttgccgcgatattcatgacgaacaaaggcaactttgatattatggtctggtattccaaggacggacagtgtaggatcgtattgggacatttactcataacctcgcttgcttttggtttcgacgctaacaagcatagcatggacactgagtaggtgtctttttgcgttatccaaaaagaacctacacgttcagtgttgattatttctcaacaccagaaagtgtagacccagaaaaaataaaaaccgttgttcgggaagttttccccgacagcggttttttgtactttcaatttaagcaggaatctgctatctagcgcaaggccgggatcacagctgtcaattgttgaacaaccaacacactgagcgccatcttgagcaagtcaccaggaatataaatcaagacactcgcaagcgctgggacaaagcccaaactggtagtcgcagctaaccacgcggcacccagaaattccgtcaaaaggaccccaccaaatgtcatccccagtactttggttaaccaaaaatcaggtttcagataatgcgttatggctgcatatgctatcggtgtcaacaaccagccatacatgaaaccagcagtcggtcctaagaaaatagcaatgccgcctcgaccgcctgtcagtactggcaagcctaatgctgccaatgccaataacataccaattgtgatcgttgctggccgcgttggtaacaacattgcaaccaacataacacccatgttctgcaagacaatcggcacaccaagaaagccaacagtgatcggtggcgcaaaggccaagccaatcaaaactgccaacaatagtcccatccgtgtcaaagtttttgtttgcatgaagtcaccattcccatcttatgtttcacttaggataccatatcgtgacgccatgcagtaccaaaaatcgttcagggcatgtctcttttttgttcttttgccgaaaaatcgcctttttgtggctaaaatacccgattgttacttttcttcggtcaatttaccttcataagccagtttctcgttttcgtagcccagcatgtgatcttcaaaatgatcaattttgtagtctaggtagcgaagggtcttgttaatattatcgcgccgttcaatcaaagcatcacgttgttcaataaacaaagactttcgggctgcaattgtttgatcgccttcccgtaaaagcttaacaaactcggaaagcgattcaatcgacatcccagccttacggagaaccatgatgtaataaacccagttgaccgcatgttcatcgtagtcacgataaccactctgattccgttgaatttcaggcaataacccaattctttcccagtaacgtaatgtatcctttgtcagattaaactttttactaacttcatcaattgtcacgcttatcgctccttcaacagtctcagcagatcaacgacatgattatctggcattcacccacaaactaagttcagtggtctaataccgatcacaacggatttttgactcagatagtcaaatgatcctttgcatgatgtgactcaccatgagctccaatcaatacctgataaacctttgtccaagcatctcaaaatttttagcacaccaagacgtttctacaacgttgtcagccatgcagagatttcggccttcttttgggcgacattgtcacccgccataccaaattcttgtttgacttgcagttgcccagctgcctgtttaaacgcctgttcataggcgccgggtgtgccagcatcggtataaaaaggcctgaatacagctcgactgccttgcacctgttttagaaaactcaaaactggtgttgatggcgctgccgaccaaaccggaccaccaaccaagatcgtttcataaccggtcagatcaggaataaccgttgtcagatgcggtaaatttccggacgctacttggtgttttgcccgaccagaggtgtcatacatatctgacgaaaaagtttgctcaggaacacgtagagctaacaggtctgcatctgtcgccttttgtaaatatttcgccaatgtagcagtatgccgtggccatgaataatacacaatcagtactttacttgccatgacagtctcctttaaccttcaaccacgattagtgacttaatggccttccgctgatccatcgcatcataagcgtcctgaatatgtcaagatcaaagcgttgcgtgaagactttgcctgggtgaatctcgccattcaagacggctttgagcagcaattgtttgtcatctgtcgtgatcgaagcgatccccccacgcagaccaatatttcgccagaacagattattcgtgttcatctctggcttttgaggtacgccgacacgacccacaactgcgcctggacgacctactttagtggcagtatccactgactgttcagtgccaacacattcaagcacagcatcagcacctgcgccgttcgtcattgctaagactttctgaaccgcttcatccccacgttcgggtacaatatcagttgcgccaaaagcaatcgccattttttgccggtcttcatgccgactcatcgcaatgatgcgcttagcaccgcgtaacttggcagcaatgacgccgcaaaggccaactgccccgtcgcccatgacaacaactgtatcgccttgtttaacctcggcgcttgcagcagcatgataacctgtcgccatgacatcagccagtgtgacaaatgaattcaacatctcatctgaataatcgctcggctgacccggaattttaaccaaggcccagtttgcattcgtgaaacgtaaatactgcccctgatagccaccattgccgcctgcttcctgattcatgcaatcaccatcaaaaccggcaagacaagccgcacagtgaccgcaaccatgtgtaaacggcgcaatgacaaaatcaccgacatgaatatcatgaacttcagcaccaacttcttccacaatgccaatcgcctcatgaccaacaagactattagcgtctcgatgtgagatgccgcggaaccaccataagtctgatccgcacacactggctcgaacaatcttgatgattgcatcagttggcttttgaagctgcggttttggtacatcttgtgtttcgactttacctggtcctaaaaaaacagctgctttcatttgaaatacctcctaaatgtgagcacgagccagcacgattaccaaccggcgtgtaagtgaccttgggcgcgatggtcgcactttgaccattacaaccaaggtccttacacgcagattgctgcgctggcgagcgcgttatcgtgagcgcttttccccagttaataaaccggtcgatctgatccggccgtatcaggatcggcaatcccgacactgtcgtttttcaaataatcaggatccgcaatgatcttaagcaccacgtcggccacactcttgcgtgagcccgaaactccgacataagtttcatctctatgcgtcagttgatacttaacgtcacgatcatttagccaaggtaggcgtaaggttgtgtagtcgagacccgactgttcaagaagttgatctgacttcagagctgatggtaacccattgccgatagtcgccttgttccacttgccaaaggtgcctggaacttcgtcatagatcccgagaacattcgtataaatcacccgctgcacgtgaccagccttcatccccgcaatgacattttgggtttgttggctgcctttgctatgatcaaccacgccgacaaatacaagatcctggtcaaccattgcttttttgacatcatccaaccgatcaagactgccctcaaccagtgtgacccgcggatttttcgccaactgggccaagcgtgattgatggcgtaagaacaaggttaaatgtacattggcgaattgatcatcgttgagaatttgattttcaatcagtcgtgaaatctggccgtttgcagccattatcaaaatattctttatcaaaacatcgcctccatgtagatgtgcatcgcttgcttgagttttccccgtgaactgatatcgcagtcatcactgccgattcagctatagggggatcaccccagtcaagaaaaacgttatctgtatctaattcgtttatggctgaatcaataaagatgccatgatcgtggacaagttgcgttatctaaaccttacttcttacgaacaaaggctatattaaacctttgtgtgcactccaatgcaaccacaatcatcatcattatttcgctaatgaatgtgttgttgtcgctcaatttacgcaaactcaatccagaggctaactttggcctgttgtatgccacacctaccgtaatcgtcgcccttgatttattgctcaagctagtcggtctccttatttctgtgaccattttcccagccgcaatggtgctatcaatcttattggccagccttctattgattttctttccaaaatcagcatgaaacgacatggtaatttatgaaaatttgcaaaaaaatagctgtgaacgaaatttcgttcacagcttccgactgcccaggctggattcgaaccagcgaccctttgattaacagtcaagcattctaccactgaactactgggcaatgagtatgtatagtatattctcatgtttcttagaaaaatgcaatatttttcgtctttcttttttgccatttccctttaaaaaatttaaaaatagttttgacgtgcgcagtatgaccacaaaaacgctgacagtctttggttatcgcttgatgaacctgcatagtgcccgtgaaatggccgcacgttgacacgcagtttcatctataataagggtgaaaggtcgtgaacctatggatgctccttacccgaatatgcaagatctgcctgatttgccgtctgaatccggcaacgatcaaccaatatggcaagcacttgccaaaaaaataccctcagttgccgatcgccgtgttctcgtcattcattgcggcgatggttggttttgtcgtcatgccctcaacggcggtgccaccgcggttctcggtattgacaccgatgcggttgccattcaagatgctcgcgctgttgccagctccgatcgcttacgttatcgcatcatgccggataaatggctaaaactgttaactggaccatatgatctcatcgtcggctcatttgatcaatcaccagaggagctacgtgccatgactcatgttttaagtgcgctgcttagtcctaaaggccaacttatcgccgctgttgcaccatcaaagcagcccattggcgatgatctcgcagttgatgaactgatcagctcacaacttgtgatcaatcgttggtaccaagtgacggataagcggctcacccaaacggaacaattatatctgttgcttagctcgcgggtttcgcactgacatctcaaggtgagcaacggtcattgaccactacaattaaaatgagcacaaaaaaagccgaagcacttgctccgacttttttgatgcattcatttaattactgaagtacttcaacggttgcggacaagatccctgctgcaggaatctggccactcggcattgcaacatctaactgattaggattgcctgcagcaaaactaccagtatcattaactgtccgagtcaatgtttgaccattggacatggtgatacgtaatacggtgcctttagggaagacgctcaaattagcagcaacgccactgtagcccatgttgctacctagaacagccggatcatagaagctgatcttgaaggtgcctttgttagttgcactttgggttggttgtgacgtctgagttgtctgagcaactggttggctaaccgcctgctgttgtacttgttgttgctgcttttgttgcgcagctgcctgctgagcctgttgttgctgaacttgttgcttttgtgcttgctgagcttgttgcgcctgttcagcagcctgttgttgtgcttgctggttagcggccgattcagcagcagcttgaactgacgcagctgattcagcggcagcactttgcgcggcagcactttcagcggcgctttgcgctgctgcggacgcagcggcactctgagcagcagcgcttgatgcagcttgcgcattagctgacgcagttgcggcctgagcagcttgttcagctggtgacgttgtctgagtcggtgcggcagccgcatcagcctttttcgtcaatggtgccaactgctgcaaagtattaatactcagatagcgttctggaatccagccgtggtcttcagtttcataccaaatttctgcgaagacttttttactattcacaaatttaacgtgttcaccagttgtcacataacgcttaacttgttgacccgctgtcggtgaggtccaaacagtcgtagcaccaccgttgtaggtaacatcagcttcggttttgtcgctagctggtgcactgacggtcgcggtttcagtattcttcgtagcagcgctgacgtgacttggcttggacaatgccacggcagacagtgcaactgctgagaataatactgtacttaaaagctttttcatgttcgtattcctcctgggtttgtgtggtgatttaactaactgagacttagtatagctatccagtgttacgaacatgtattctgtgtgttgcgattgggttaagttctatgacaaaagattacattagatgacatccttaacaaactgacactgtctttttgttaaaccaaactaaaacggcatctctgtcaaacagatgccgtttcacttctataggaagagtcgatccaatgttgctgccaaaacctgatgtccgtgatccagtatccccggattgacggggccttgcggtttgcctgctgccgcaccaatttcagcaatcatgtctggggtcacttccagatggaactggaagccaacgatatggtcatgataagcgaagccttgcagcgcatgctcattttcgtaaagtaatgtacttcctggtaagcggctcattgcttccccatgccagtggaaaacattgagtaacgagccatcggtaccgcgcacggtgccgatgccttcttctggttgcggcatccgataaacattggcaccaaatgctttggtaatctgctgggcacctagacaaatccccaacaccgggcggcccaatttattgaggctgcggatcaaaattcgttctgcggcgagccaatcaaagtcatcattgacgctcatgggtccccctagcaaaatcaacccatccatctctgctgggttcagttgtgcaattggatccccttgatcagggcggtaagtgaccatgtcaacttgcttgtctgcggcccagtctttaatcgtgccaagatcctctgtatcagtatgctgcatgactgtcagcttcatgctgtcgtgctcctttcgtggccgcttaatcttggcctttcaatgctgctgcaaatggcttgattgtggtcattgcgggatcataaatcgcaaagtaaacccgcttaaacgccccttcaaattcgggcaataataacgcttttcgaaacaacttggcgactggtgcaactggattgccaaatacgccggttccaaacgcgcctaaaatgacctgatcgacatcatgcgccttaaacgcccgaagcgtctgcagaattttaaacgcgatatcgttcatggcagtggcatcatctagcgttgcatcaattcggcgattaggtgctgcgacggtgacaatgtcgacatatttgtctgttaatcgccgcccttgatcatcgaaaagctggcgaacatgttctgcatagatcaacttctgactaaaaagcccgcgatttggcttgcgacgattaagctcataataatctgccatgtgctgctcaagggctggaaccaaataagtccccttggcaatggcttcttcctgcgcacgtgcgccaactgcaaccccgccgcctggatcgaccggacttgcaaaattcatgacgccgattttgcccgtcagttcactcatcaattggaaaacatcaacattacgcaaggcaatttgcggcggttctgtccctttcgctggcgtttgcggcaatggttcgctaatgacctgtgttttgggcatttctggtcgtgccttaaatgctgccattgtctcttggtacatcttgacttgttccattcctgccaccttcaattaaatattttcgattgacccaagcataacatagaagcaaagtgatggaattatcggtcatctttgtcattcaatgttaaaattaactttgtacgatacatgaaatgaggaatggaatacatggaaagtggccaaatcgtccccaatttattggtgatgctcgtcacctttttattcgcggcattttttgtcgcgtgtgaatttgctctggtgcaaagtcgtccaagtgccttggaagaaatgattgataattgtactggccgtaaagctaaagtcgagcgggctttacgaatggtgcataatctaaacgagtatctctcaacgacacaggttggtgtttcgctggcgggcattatccttggttggatcggggaaacaaccgttgagtttttgttggttgatctttttggcttgacccacctgagcttgcctaatggtagtctgcacgcggttggcgcgattttaggcgtgattattttaacctatttagaagtcgtgttaaccgaaattgttccaaagaacatctcgattgattatccgatcaaaaccttaatgctggttgtaacaccgctacattatttccatattttgttctatccttttgtttggctgctgaatgtcagtgccaccgggattgtcaaaatgatggggatgaagcccgcagacgaaggcaacgaagccttttcgcaagctgagattctgagtctgagtaaaaatgccgtcacaactggtgacatggaacaaaatgatgttatctacatgcagcgggcatttgaactgaatgacaagaccgccaaagacatcatggtggatcgaaccagcttgtttgtcattgatatcaccaccaccgtcaaagaagctttgcgggattacttaacgcaaggttacagccgattcccggttgttgcgaatggcgataaggataagattctcgggtatgtttacatctatgacttggtcaaacaaggtcaagttgacccgtctgtgaaagtctctaagctgttacgttccatcattaatgtgcctgaagtaacaccgattcatagtattctggcacaaatgatcaaaaaacagacgccaattgttgtggtcgttgacgaatatggtggtactagtgggattgtcaccgacaaggatatttacgaagaactatttggtaccgtcaaggatgaaattgatgatgtctctgatgaatacattcggcaaacggatgatccaaaggtcttccgagtcagtggcaaaacaaccttgtgggattttgaacgttacttccacaccaatattaaagccttcactgattcagaaatcatcaccattgctggctttatcatggaagatcatcccgatttgaaactgcacgataaggtcaagattgatcatttcaacttcaccgttgcagatttttcccgtggctttgctaactggtttgatgtcacacaagatccaaaaccagttaaacaaacggttgctgaagaggttaaagaagctaaaaacgacgataacaagcattaatcaggatcaagctaaactttcaaaaacgtggtactcgttgaggggatcacgtttttttatcgtaatctatttttgtgcaataccgctaggcgcaactaccagccgataaactaaaccctaatgacagcaacgatttcattatgtacccaaagccgttgaggacgtgctagactggattataacgattttaagaaaggacacgatattgttgacaacaacagacgttaatggtcatccatataatcgcttgctgcttgtgattaccttgttgatcggtacttttacaacattcttgacgcaaacgattttgaccacggcttacccgacgctgatggcggattttcacatcagcgcgagtgcagtccaatggctgaccactggcttcatgctgattatgggtattatgatcccagtttccgcatggctgctggataaattcaatgttaagtatctctacttaacagctatgacaatctttttccttggttccttgatttgttggttagcaccagattttcaagttctgctggctggtcggctcacgcaggcgattggcgttggtatgtcaatgccgactttccaaacagtcatgttcacgattttcccacctggcaaacgtggtagtgccatgggcctagctgggattgttattggcctagctcctgccatcggcccgacgctttctggttggattctgcttaatcatacttggcgggctttatttgccgttattatgccaattgctgctggggtcgtgctgctggccatctatagcatgcgaaaagttttgccgacctcgaatccaaaaattgatattccttccattattgcttcgactttgggttttggcggcttgctttatggcttctccacagttggtgatgctggttggaccgattcccaagtactgattagcttagccatcggcattattttcgttgccttattctgcgtgcgccagttacgcctcgaaacgcctctgctagaactgcgcgttttcaaatcgcgaacgtatacattgagcgtcattttaacagcggtggcatttatgtcgatggttggtgtagaaatggtcttgccaatgtacatccaaacgatccgtggtgaatctgcctttcactctgggatgatcctttttcccggagccatcatgatggggattatgagtccaattaccggccggattttcgacaaaattggggccaagcggctggctgttgccggtctgttcttgctagttgccggatcgctgccgctggtcaccctaactgctaacacgccgattatctatattacgaccatttacacagtgcgcatgttcggcattaccatggtcacgatgccggtcaccactgctggtatgaacgccttgccaacacacctgatcaatcacgggacggcggtcaataacacggttcggcaagtcgccgcctcaattggcaccgcaatactggtgtcagtattatcagtagtcactaaagatgcaacgccagccgctagtggtcgactgcttgacccgatccattacaccaacgctatgaacaatgcagtcattgccggttatcgcgcggcttttgccgtctcactagtcatggcagcgcttggtctcgttctcagcttatttttgaaaacagacgtcattgatcggagggacgcctcatgattatcttgttattgatcgtcggtgcgcttgcctttttctgggctgttgtgttaatgcaaccaagtcggcgccgtcaattaacgatctgggtaagcgcgggacttgtcttggcccccatcctattgttaagcgtgaatgacctttatcacgttggcttcaacattgacgaaaccactgaactgcagccattagcaccgatggacgaccagttgcaaatttcgcggcggcccattggcacagcaaaaaagcatttcagctatcgttaccttatcatttccgatgcaaccgttcataccgctacacctagtaccacggtctcaactcgcatcgaacacggcaccattccgcaagttgcagtgacaactcagaagctgacttatagcaatgcgctgaccgctattttgtttgctggatcaggcgaacaaggtaaagcaattggcaaaatttacaccttcacactgccagcaaattggcagattgttgatcagtaaacgccatcttgcactcgcagaaaccgattcacgttccgtcatcacgcactcaccagcacaaaaatttgaagctgagccatacacttatgatttgttagatctcaattgatctgagtaatgggtctggcaaaaagtttcttgccgtgccaaactccgcaatctccggccagatggggtggcgacgcgaagctagagcggagacggcgcttcgagcccaaagaccggtctcgaagtcgcctaacaacatcagcgccaaagcccgtcgctgtgttgtttgcacggctgagccccatctggcctacgattgctacgctttggcactgaaatctttaaagcccaccctgcgctttctatcaaactacttagcgctaaaaaagtctgacgttcagcgaaacacttcatctcgctgaggatcgtcagacttttttgattgcccgtatttattgcggttcggccaacagcatgcggtacaaggtgctgatgggcaggcccatgacattgtagaaatcaccctgaattgacttgaccagtagtgctccggcatcctgaatgccataggcgcctgctttgtcttggtaggcgtcttccgccagatacgattcaacatccgcttcacttagcggccagaaggtaacatcagtcgtcacgacctgctgccgtacgctaccattgtccaagcgcacccacaaaccggtataaacctgatgtgtctgaccacccaatgccgtgatcatctgtttggcttcggcgcggtcatgtggtttgcctaataacttgccttgaaacgccaccatggtatcggcggcgataatcgttgccccggggtaacttggtacaagtgattgtcccttagctgtcgccaagctctgaacatatgctggcggatccaacactggcaaagcgcgttcattgatactggcaggatggctttcaaagtcaggcacaatccgctttaacaattcctgtcgccgtggtgaatgactggccaaaatgatcatgcttgcatttccccgctttcgtgactgtcttgaatccgtttgaacattttctcaagatcggtgtttgaaaagtgaaccaaaaccggccgaccatgcgggcaattgaagggattctcacattccggcaacttctgcaataatgctcgagcctgtctgtcgtccaaatggtgattggccttaatggcacgcttacagctcatcatgatagcagttttctcccgaaacgctgcgactgtcatgcgaccatcacgcaaaacccaatccaccatttctttaatggtatcttcttcctgcccagctttaaaccaagtcggatgatgttcaacaacaaagctgttttggccaaaatcttccagatatagtccaaccgactcaagcacgtcccgatgatcacgaatgctaatggcatcagccgcggaatagtctaacacaatcggtacgagtaaatgttgttggtcgttgctgacttcgccaatagcttgccgataatactcatagttcacccgttcttgtgcagcatgctggtccaaaatatataacccatcgcctgattccgctagcaaataagtgccgtggacttgcgccaagtacgtgagatttggaaaacgctcagctgattcgacatgcgaaatatcaggttccggctcatctgccatcaaggttgggaccacattcgaagctagccgctgataccgctgatcccatgcagccagacgttgcggttcgttaaaaatcggctgatcatccaaatcgccaatctcaagatctggtgaagttggtgccggtgtcggctcctcagcagccgtgtctgccaagttagtagttgtgttttcgcgcaactgctgcccttgctgcggctgaactgagggcatcgtcttggggctgatcttattcaatgtcagttccagttgatccagatcataccgttctctttttggcagattatcgagcgcatcgggaatcaggttttccttcgccaatcgtgttcgaatcgcctcgctgagcaaatgactaagctgatcttccttgctcagacgcacctcggcctttgtcgggtgaacgttgacatcgaccaacgcagcatccatctcaatgttgatgacgcccattggataacgccccaccattaacttcgagccgtaaccggcaataaccgccttcgtcagttggaagttcttaatataacggccattgacaactaaactcaagtaattacgcgaagctcgggtcgtttcaggcaaacttgttaacccgctaacccgaaaatcaagatcttgtgctttgaagtcaaccattgagcgcgccacagacaagccataaattccggccagcgtctggcgcaaatcgccttgaccagctgtgcgcaccaccatattgccatcatgtgaaaccgtgaaggcaatatcaggatttgccatcgccaatcggctgacgatatccacaatttttcccagttcagtttgctgcgacttcatatacttcagccgcgccggtgtgttgaagaataaatcattcacttcaacatccgtaccgcgtcggtgagccgctgtcgactgcgcttcaacctcaccgcctttgacgtgaatctgggtgccactccctgaatccgttgccgttgtcaactttacgtcggcaaccgcggcaatacttgccaacgcttcgccacggaagcccaatgaatgcacattaaataaatcacgcgtcgtcagaattttactggtggcgtgccgcaaaaacgctgttgcaacgtcatccggggcaatcccgatgccgttatcgctaacccgaatctcctgcaaaccagccgcggaaataaggacgtcaatttgcgttgcttgtgcatcgatactattttcaaccagttctttgacaacactggcagggcgttcaatgacctccccagcagcgatctggttgcttaacgttgccgatagttggtgaatctttggcataaaatcacttcttctttaaatgcttctgcaggtcaaatatgaaattcatcgcgtccatcggtgtggccgccatcaagtcaaatttcgcaagtttcgtcagaatcggactattctttggtgtcggttttggttcttcaaacaacgacaattgttgctcttcaacttgcggtgctgatgctggcgccgttttattgggtgcatcggcttcaagctgcttcaaaatcgtatcagcacgcgctaacaagtctgccggtaaaccggcgagcttggcgacgtgaatcccataactcttatcggcagggccaggcatcattttgtgcaagaaaaccagattgccatgctcctcaacggcaccaacatggacattctttaacttcgccaaggagtctgacaaactagttagctcatgataatgcgttgagaacagcgttttggcgtggacatgatcatgcaaaaactcaataattgcctgtgccagcgccatcccatcatacgttgccgtgccgcggccgatctcatcaaaaagaatcaggctggaagccgtcgcgtggcttaatgcagcattggcttccagcatttcaaccatgaaagtactttcgccattggcaagatcatcagccgctccgattcgggtaaagatctgatcaaaaatcggtaagtcagctacatctgccgggacaaacgaacccgcttgcgccatgataacaatcaaggctaattggcgcatgtaggtacttttccctgacatgttaggcccggtgatcagcaacatatcggtgtcgtgattcatgatgacatcgttaggaatataactgtctcggccaagtacatgttccacgactgggtggcgaccacccttaacattgatatcatgggttccggcatgcatcgttggtcggacataatgactgttttcagccactgttgcaaagctttgcaacacgtccaaagatgaaatctgggccgctaaagcttgtagtcgtttgatctggactttgaccttgtcgcgaatgtcttggaaaagatcatactcgagcgctgttgagctttcctgcgcttcaagaatcaaggtctccttttctttcagctctggggtgataaaccgttcagcgtttgtcagtgtctgtttacgttcataacgcccttccggtattttgtccaaattggacttagtcacttcgataaagtaaccaaaaaccttgttgtaacgaattttaagtgtgtgaatgccagttgctttgcgttccgatgcttctagttcagcgatccattgtttggaattcttcatggcatcacgatagctatccagtttttgattgtatcctcggagaatcaagccaccgtctgtcactgaaatcggcggttcgggttcaatcgcacggcgaatcaatccagcgacatcgctgactgggtccattttactgcgaagtgccttaaaactgccatcatcaagcttacccagcacatcctgaatagccgggatctggtccaaagaggtttgcaactgaattaagtcacgaccattaacggtaccaaaagcaactcggccagctaaccgctcaagatcatagactttagttagtcgttcctgcaactcactgcgttcaaaaaagtgatccaacaaatcctgaacctgattttgccgcacactgatcgcatcaatatccagtaatggtcgatccagccattgtttcaataagcggccacccatcgctgttttggtcgaatcaagcaacgacaacaaggtgtcacctttgcgtcccgttctgctgttttgcaaaatgtcgaggttactacgggcgtcctgatccatttccagataagcggaaggttgataagcaaccgctttttgaatatgggccaagctgcgtttctgcgtgttcaataaataggccattagcatctgcacaacggcagcctctgcaggatcggttagcgcctgtgacacataactgccttcactcgtcggttcggcatccggttggactgacagaagccgttccccttgcttgagcattcccgcatcgtcatcggtcaattcctcaggcacaacgatttctttggtggccagcgcactcagttcgttttgcagagcaaatttgctttttagatccgtcactttgagctcaccggtcgatacatcggcatacgcaaacgcataacctgctgcatgcggcatcacagcggtaatatagttattcgacttggctgcaccggctttgatgtcaacatttgtccctggcgttaccaactgaatgacggctcgtttaaccatcccgacagcttttttagggtcctccatctgttcacagatcgcaactttgtaaccgtggtcaattagaatatcaacgtaactttggacagcatggtgcgggacaccagccattgggataggatcgtcagcactcttgtttcgtgcagttaatgttagttcgagcaactgagcacctttgatggcatcatcattgaataattcataaaaatctccgatgcggtaaaacaaaaacgcatccggatattgcgccttgatttcgttgtactgctgcatcataggcgtttcactggttttttgcggcacgaaattcacccttcgtcctttgactttctttgacgttctatatgacccattttaacaggtgcgtcaactttgagcgaccccctgacaagtgcaaagggtgagttgtcgcggttagaaatcgaagcatcggtaaacttgaagttaaatggctggttttgagccatttagcttcaaggttcttatgtacagatttccgcggctgcgcatacgttcaaatcaaaaaacgatcagatcatcatgatctaaccgtttggcaagtagcctcactacttcttcaaatgataactgtaagtggcaatgatgacattctcgcggcttgcaaaggctgcgcgcaagcggaagttggtttggttgtgaagaatattctgccattttttacgtggtacgaactgcggaatgagtaccgtggttgtaaagttccgtttggcggcgttgcgcgcgacgatgtcaacgaagcgaatagttggggcttcgatggaacggtatgatgagtggatatcaacaaatcgcacctctggaaaatccgcgcggaattcgctttgggtttctttttccttattcggattctcgtccatcgaaacgtgcatagcaatgacatagtcgccaattgactgagcataatttaaggccgcgcgcgtaacccgagtgacattaccgaccaaaacaatgacggtgctgccatcgtaatcatgttgtgccacttcgaccggcaagcgtaattgctcagcaactttgtcataatgatcgcgaattttataaaacatgaaaatggcgagtggcatcacaataaagaatggccagatatcaagcaatcggtaagcaaacaggatgacgagaattgcaaaggaaatcaacgcgccagagaagttagcaatcgttttgccaatccaaccttttccgcgatgacggaaccaatggataatcatcccactttgcgacaaggtaaatggaatgaacacaccaaccgcgtacaacggaatcagccgttcagttgatccttggaaaatcgtaatcagcgctgcggctcctaacgccagcgtcaaaatcccgttagagtaacccaagcgatcgccacgatccagatacatatgcggcataaacttatctttggccaagttaaaagccaaaactggaaaagctgaaaatccggtattagctgccacagccaagatcaaggcggtcgcaaattgaacaacgtagtacatgatacctgctccgccaaaggtctctttggccacctgcgaaagcaccgtcactttggccaccggcacaataccgtaccaatagttcaaaaatgtaataccagcaaagaagaagccaaggatggcagccatgatggccaacgttttagccgcattcttttctttaggcattttaaagaacggcaccgcattactaattgcttcaaccccagtcagtgaactggacccactggaaaatgcccggaagatcaaggccatcgagactcccggaatcgctgcaccgacaaaggaagttgccttgtacggaatagcgcctgttgccacttggtaaagtccccagatgatcatgcccgtcatgacgacaacgaataagtaaaccgggaccatcaaaaaattggccgattcactcatgccacgtaaattcatgctcatcaagatgaaaatgatgatcagtgaaatgaccacctgcttgccataaagcgcaggaattgcactggtaatcgcttcagcacccgcggaaactgagactgaaaccgttagcatataatcaatcagtaatgaagcgcctgcggttaggccggcatttttacctagattttcgctagcgacaacatacgcgccgccgccactaggataggcgtgaataatctggcgataggatagtgtcaatgaaatcaagagcactaaaacaaaggcagcgatcggcaatgagtaccaaatcgcagccgctgacaatgtcgtcagaactaagacaatttgttcagtcccgtaagccacacttgaaagcgcatctgacgataacatcgccagtgccttgaaaatgttaagcttttgaccgccttcctcagaagatttcagtggtcgcccaataaacaggcgctttaaatgcatcattttcattactcctatatgaaccgaatgtatcgggaaaatttaaccaaaacacaaacaatcatcagtgtaacctaaatagacgctcaagcctaccttatctgacgcaacatgacaacttggtgagattccctgacgaaaagccccaataatatcgtcctaactagcatgatgtgcaaaaaagcaaaaacggccaccttctcggtgatgcccgggaaagtggtcgttttcgttacgccttttcgataatcacaacatcatggaccttcaacttgcgatgaacctcgtgctcgatctcgcttttagcagcgtggtcaattttaaggtcagctttaggcgtatcaggcaacagtttttccaagacaaaatcaatctcagcatctttaatggtgcgtttgtcgtgggtcaagacgacatcgacttggtcaaatccttcaacgtaataaacatgaacagatcctaacgtatataattcaaaaaacttaaccggctttcgattataaagataccgcattgtgttcggtaacattttgtgcaagctggcgttaagccgaatgggattttgaatcagcttcatcaaatcgcccctttttttgtgtgagcgtgagccagcgcgcttagcgaccggagtgtaagcgggcctgaacgtgatggtcggtttttgaccattgcgttcagggtccttacacgcaggtcgctgcgcgggcaaacgcgttatgactgagcgtgagcttgcccggttagaaaccggagtataagtggcctcaagtgcattggccgggctttggccagtgtgcttgaggtccttatacgcaggtttctgggcaagcaaacgcgttatgactgagcgtgagccagcgcggtagaaaccggagtgtaagcggccttgaacgtgatggtcgggttgtgaccattgcgttcaaggtccttacacgcaggttgctgcgctggcgaacgcgttatgaccgcgacatcgctttgatgtccacggctgatgatcttattaattaaccatcatacaacatgaaactacctttattttaccaatgaatgccccttagtgactaatgattaggcacagaaatgttaattaacttcataaagtgaccttgaaaacttgaaaagcacactatgtaaacaacaaaagcaccggcgcataagccagtgcttttgttgaacgaataggcagaaattacatcataccgcccatgcctgctgctgggttagcaccagcggcagcattattatttgcatttggatccggcttgtcagcaacaacggcttcagtcgtcagcatcaaagcagcaacggaagcggcgttttgcaatgcagaacgggtcactttggttgggtcaataatacctgacttagccatatcttcccattcatcagtagcagcattgtaaccaacgccttgcttttccttcttcagctgttcaacgatgacagaaccttctttgccggcgttctcagcaatctggcgaataggttcctcaagagcacgtagcacgatgttgatcccggtttgaacgtcgccttcttctttcaaagcagcaactgcaggcaaaacatctaccagagctgtgccgccgccagcaacgtaaccttcttcaaccgcggcacgggtcgcattcaaagcatcttcgatccgatacttgcgttccttcaattcagtttcagtagcggcaccaaccttgacaaccgcaacaccgccagctaacttagccaaacgctcttgcaacttttcacggtcgaagtcactggtcgtgtcatcaatttgcttcttgatgatattaacccgttcagcaatggcatccttagagccagcgccatcaacaatcgtggtgttgtccttggtaaccgttaccttgccggcgcgacccaattgttcaagcttggtgtctttaagatccaagccaaggtcagaactgatcacggtaccaccagtcaaggtagcaatatcttcaagctgagccttacgccgatcaccaaagccaggggccttaaccgcaacaacattaaaggtaccacgaatcttgttcagaactaaggttggcaatgcttcaccagcaacgtcatcagcaatgatcaacagtgccttaccttgttgaacgatttcttgtaacagcggcaaaatgtcctgaatattggaaatctttttgtcggtgatcaagatataaggatcgtcaaggtcagcttccatcttatcattatcggtaaccatgtattggctcagatagccgcgatcaaactgcatcccttcaacaacagagagttcagtgtcaatccctttgctttcttcaatggtaatcacaccatcgtggccgactttttccatggcgtcagcaatcagactaccaacttctgtatttgaggaagaaacggacgcaacctgcgcgatttctttcttaccattaactttgtggctaatcttgtgcaattcgtcaacggcagccttagttgccttttcaatccctgtgcgaatgccaacaggattagcaccggctgtaacgttcttcatgccttcgcggataatactttgtgccaaaaccgttgcggttgtggtaccatcaccagcaatgtcatttgtcttggaagcaacttcggcaaccaacttggcgcccatgttttcgtagtgatcttccaagtcaatggacttcgcaattgtgacaccgtcattggtaatttccggtgagccatagctcttgtccaaaacaacgttgcggccttttggtcctaaggttgtcttaactgtgtttgccaactgatcaacgccgcgcagcattgcagcacgtgcgtcttcagagaatttaatttcttttgccattgtttttattcacctcaaaattgatcgattatttagttacgcaattgccatgatgtctttttcatgcaatacaaggtagtcttgaccttcatacttcacttcagagccggcgtatttgtcgtataatacagtatcgccaactttgacggccattggcaaacgcttgccttctggtgtcaaagcgccttcacctactgcaacaactttgccggtttgcggcttttgttttgcgttgttggctaaaacgatgccgccaactgtctgctcctcttcttcaacgacctcgacaatcacgcgatctcctaatggttttaacaaggcaatccctccacattacattttttgatttagcactcgttatgtctaagtgctaactacagaagtaactataccgagttttgcggttgaatgcaaccccaaaccgtggaatgttatacttattccagacatttttttaaaggagctctttatgtcactacaaaaacatggactttccattattggtgcctatttagtggcgctgattggtaacttgctgattttccaaatcttacccgttggccgactcagcttaggtcttgctactgtgatcagtgtgctggcgatgattgccgctggtttcagtgagcggcagttagtcattgccaacgccatcgaagaacctggggttgccgccccacaacaacgggttttctggggactaatcggtattgttggcgttttggtcgctcagcttgtgggttcatggctagaaacatttttattcaaaataccgcaaactagcagcctgattcatcagcagctgtccagtatggcaactaatccgtggtatttcctagtgatcggattggctatccctgtgctggaagagctaacctatcgcaaagttctattcggtaatcttgtgaatgtcaccggtatctttggcggtgccttgatcactagtctcctgtttgctttaacgcaaccgggcggacactggttaagcgccacattggttggacttgttcttgcatatgattatcgacacactggcgcagtcagcacggctattatcgcccgccttggatctttgtgggtggtttggctttactatctcgcccacaccctataatcgtaatcgaatattaaccttgacccctgctttcatcccttataatagaaataatgattttgtgaaggagcagttcaaacatggagacccgttctaatcgccgccaacaacaacagaagccgaggcgttttcgctggggcaaattgatcggcctaatcgttgtggttggtctgttcacaacaggtgcgtatgccttgcggttatacagtcaggcaaaatatgccatcaataatacatatcatgcgaccaaacatgtcagtaccgacattgctaacaagaaaccgttcgccgttttgctactaggtgtcgatactggtgctgatggtcggattgaaaaaggcaactctgataccatgattgttgctgtcgttaatcctaaaaccaagaaaacaaccatggtcagtatcccccgtgacaccgctgcagagttaattggcacaaaagaattcaacatgcagaagatcaatgccgcgtacaacgttggcggttcggacatggcgatcaacactgtttccaagctggtcaatgtcccgatttcttactacctaacaatcaacatgggtgcgcttgaaaaagtcgtcaatgctgtcggcggtattgatgtcgtcgtaccgttttcgtttcaggatccatacactggcaaccagaagttcacgaaaggccccatgcatctcaatggcaatatggcgctggcatattcacggatgcgtcactctgacccagagggcgattatggccgacagaagcggcagcaacaagtcatcaaggccattctcaaaaaagcaatttctgttggatcacttggcaattttaccaagctcatggacactatctcaaaaaatattgccacgaatatgagttttgatgatatgcaaagtattttcttgaattaccgtgacgccgccaaaacagtttcgactgatcatttgcaaggtgtcaacgcatgggtcggtgatggtgcttaccagattgcttccgacgctgagatgcaacgaatctccaacaaacttcggacagctctggggctgcaaaccgaaaccatcagcaatgaagagacaaaacaaaatgcgaagaacacgcagtttgactttaaggcaaccacggaccaaaactacattatctttaccccgtatgattgatcattcaaaaacacccgcagatttcactgtctgcgggtgtttttgcgcttaaattcaggcttcaagcaagtttcttctggggtcgttcccgataccaccaccagaaaccaagagcaagaatggctatgattgaaacggtataagaaagcagctcattgtttaacagccactgaccaagcccgtatggtacgacagccaatgcatatatcatgaccacccagcgtaattttggcagtaagagaacattgcccgcattttccagcgaaatgtggtcaaatggtagattgtaaaattaatccgaacgctgttcggacaaaaaagatcagcttcctttaaaatggtgtttaccataaacccatcttttaggagctgatcttttgtctagtataacctattccgaacgaattaaaatcgaaaccttttgtgaactagggctgtccaatatccaaatgggcgttcggctgaaccgatcaccgtcaacaatttcttatgaattatctcgatgtcaaccttatcaggctgaattagcacaaacagatgccgaatacaagcgatcacgatgtggtcggaaaactaagctgagcgatgagttaaagcaaaaaattccctcaattttcaagtcaagtgcaacgatgataacgaattcttgatagtggtctaggctgttacgccatgcatcggtagtaatcgcatgggcgaagatagttcagaatacgtctgggacgatggttcagtgcggattggactgcttgaatttcaaccagggtaattgctctgagagacttccctttcgggaagaattccctaagcagtccattggcgttctcgtttgtgccacgctcccaaggcgagtacggatgtgcgaagtaaatctgggttccaacaatctctgataacttggcaaactcggaaccattgtcaaaagtgatactctcaaattccttggccccgtagtcgtcgatcgtgtcctgcaaggctttaaggcaggtgcccgcatgatagtcaggaatcttgacgatgatctcagtccggctgtaccgttctgtgagcgtcattaatgctggctcatcagctaagcgaatacctttgaccaagtcgccttcccaatgtcccacgcctgtgcggtcattcacggccgcaggacgcaactcgattgagtcgccgtatatcttcttattcttgcgcttgtgggcgttcttatagcctttgatgcggcgtcggagcttcttgggaagtgtcatgttgtctagctcaagcagcccggcgtcgatgtagcgatagacagttgtcgttgaagggcaagccttgccctggtcgcgatagaagtgtacgaagctatcaacgctgtgtacgcgcggcttacgagtaagctccctggcgagagccttgaagaacgcacggccggtcttaagaaaggcgtagtgaccggttctatcgcgtttacggtcgtgcatggcttgggcagtttccgcaagatagacttgatgcgagtgacgcttcgagtcgagctgagttacagatccacgcgtgatttctcgtgagattgtcgctttactgcgatgaagcttctgtgcaatcacggtcgcggtgtcaccagcagcctgaagggcctgaattgtagcacggtcgctaaaactgagttgttggtaatgcttgtgggtgttagtctgagagtgggtcatgaagattcctgctttcttgtttagctagcactaacaagaataggtcttcatggcctttatggtctagtcgtcagggtgttgcacttgaattgtaaactggggaagcaaaaaattctcaaccatttacgtctaagctggtcaccaggaatgattgctcacgaagttaaactagcgactaaatctatttataattggctaaatcaggggagaattgatttctccttgaatgatctacctgaacatggcgtacgccaacggcgtaacgttgaccaacgatccaaatataatcaatctttggggcgatcaattgaacagcgtcccatgatgattaatcaacgtaatcgcatcggcgattttgaactagatacagtcgttggtcctcgtgggcatagtaaggcagttttattaactttaatcgatcgaaaatcacggttcctttgggcataccggttaaaagatcggacgacagcgactgttaatgaagcactaactaagttcctaaccacttttaatggtccggtgcacagctttactgtggaccgtggcactgagtttagtgggctagtatcacttgaatcacaatatggtattaaggcctattactgccatgcttatacgccagctgaacgtggtagtaatgaacgctttaatcggaatttacgttatttttatcctaaagggactcgttttgagcacattagtgctcaagatttaacgacgacgttactccaaattaaccagcgaccgcttaaaatactcgactggcaaacaccgtatcaggttatgctgacaaatttgtccaaaaattcggattaaatttgcaatctaccataaaaagtaaggtgatttttcttagcctcttgtttactttcttcaaactgcgctaagtccatgacgtatttttgctcgttatgatagttttgtatgctttgacccaaattcaccgctgacaacaacaggacaaagactaccatcacccgcaacaaaactttatgtcgcgatcttaccagtttcaataaacgatcttcacccatttatttcacctccgcgtttttggcgcgaaactcaactttaaataaatcagatagcgataacggcaagctctcattcagcacgggttcttctgcagcaatcgcggccttgacttcaggtgtgaaatgcgggaaaaccgcttcgatcacgcgtccacgaatggtcagaatccgaccttgttccctgatcacatcaggaatcgccttggttttgaaaactaactgcagcttgatcgcctgctgtctgacgtcctctagcgtcaagtcctgactgatccgaccggctttaacgaacaaaacgcgatctgacaagccatccaattcgactagattatgtgaggcgatgagaaaggttcgtttaccatcagcaacagcatctaccaccaaattgacaatccgctcgcgaatcagcaaatccaacccatcaaatggttcatccagaaaaacatacggtgccccgctcgccagcgccaacgccaccatcaccaatgcctgataaccttttgaaagactctgaaaacgttgtgatccttgcaggccaaacttttcgattagcgccataaaccgcgcttgatcaaacgtcgcatagagcaattgataatcgccagcgattttatccaaccggtatttacggaagaagagatgttgattatcaaggtaaaaaagattttcgcgttgttccggatgatcggtcaagtcctgttcatccaactcaatggtgcccccgtccgcacgatattgatgcgtcactgttcggaagatggtcgttttcccaataccgttaggcccgacaagcccgaccacctgccctagtgatagggaaaatgtgatgttattcagtacagcctgatcggcaatctttttttgcaattttgtgatcgttaaactcatgcttgtccctccttctcattgagccatgcctgcagaatgggaatgctgatccccaaactctgcgcttcaaccactaaggcatcaaatttaggccgaaatgccgcaatatcttttgtattggcctgccttaacggttcggcaatgaacgagccgcgtcctggctcaacatagatcacgccatctgcttcaagctgcttataggcctttgcaatcgtgttgggattgagctgctcttgttttgccatctctcgcaccgatggcaatttgtcacctggcagcaacacgccttgcaccacttgtgctttaatttgcaacacaaggcgctcgtagtaagccaaatgggcatacggatcagtcgccatgaccacgccccctttcgtattatgcgtactattatacgtagtacacttaaaaaggcaagcgaaaagagcaagtcttatcgaacgacttgctctcacgtttttttcaaacaaaaaacgccgactagcggcgttttcgacaaattatgcttctggttcttttaaagtcggcccgtaatgttccaagaaataaatgagcgtctgtaattctgttgctaggtcaacgttttgcacgcgaacataacttggtacagagatgcgaatcggggtgaagttcatgatgcccttgatccctgctttaaccaaatcatccgtaatgtgttgcgcagcatcaatcggcaccgtcaaaatcacaatttcgatttgctgatccttgatctgtttgatcatttcatccatgggataaattgggacaccgctttggatggtaccagctaattcgggattaatatcaaagccagcactaatccgaatgttgtttgcctgccgaaagttgtaattcaacagcgcgtgaccaagattgccgacaccgactaacccgacattggttaaccgatcctgattcagaatctttttaaagaaattaagtagatcgacgacatcatagccgtaaccgcgtttacccaatgcaccaaagtatgaaaaatcacgccgaatagttgccgaatcaaccttcactgcgtccgacaattcagtcgaactgatcttggttgttccggaattggctagaaaattcagataacggtagtacacgggcaggcgttttgccgttgctttggggatgattgtttccgccatataagcaagcctcctgtagaagtattcccacgcagaacatgtgaactgtccaacatagtatctcttgcttatattagctggtttatagtgtgaaggcaagcggatacatcttcacaagcaaattttttattatccagggaccatcggggaacgcgcgccgatgaacgaaactatggtatattaggttctaacgattattgtgaaagaaggtatccctgtgatcattttgcaggcgcaacaagttggccgcagttttaacggcaatgaattatttgctaacgtcaacttagaaattcaaaacggcgcgcgcattggcttagtcgggcccaacggcattggcaagacgaccctgctggagatcctgactggtattgccccacccgatgctggtcaggtcacaaccatgaagaacctgtcaattggttatttagcacagaattcaggacttgattctgacaaaacgatttttaaagaaatgctgacggtctttgcaccattacaagcgatggctcggcaaatacatgacttagaagttaaactcggtgatccgcaactcatcgccgacaaagaagcttttgcggcaacgatgaaacaatacgatcaattgcaacatgactttaacgtacaaaatggttatggctatgaagccgaaattcgttccgttttacatggttttcagttcggcgaaacgacttatgacaagccggttggcactttatctggcggtgagcggtctcgattggcgctggcgaagctgctactcgaaaaacacgacttgatcatccttgacgaacccaccaaccatcttgacattgaaaccttgagttggcttgaagggtacttaaaaacctatccgggcgctattttaactgtcagtcatgaccaatatttcctcgatcacgtggtcactgagatctatgaattagatcatcaccacgcgacacattacaaaactaactatagcggctatctcaagcaaaaagctgatcgtcaagctcaagcttggaaggcttacaataagcagcaggaagaaattgccaaactgcaggattttatcgacaagaatattgtccgcgctagcaccaccaaacaggctcaagctcgacgtaaacaattagaaaaaatggatgtgcttgaaaaacctgctggcgataataagacggtgcattttaactttaccccaacgcgaccaagcggtaatgaagttttaaaagtcgagcaggcgacagttggttatgagccggacaaacccatggctggcccgattgactttcaagtgaataagtttgaccgaattgcgatcatcggaccaaatggtgtcggtaaatctactttactgaaaagtgttttgggaaaaattccttttcttaaaggagatgccaagtttggtgccaatgtcgacgtaggctattacgatcaggaaattcaacagcttaaccctaaaaatactgtcattgacgaaatctgggacgatcacccgatgatgcctgagaaggatgtccggtccgtgctcgcggccttcctttttttggcggacgacattcaaaaaccggtcagtgccttatctggcggccaaaaagcgcggctggaactcactaaattagcgttgaaacacgataatttcttagtgcttgatgaaccgaccaaccatttggacatcaacagcaaagaagtcctagaacaggccttaaaagacttcagcgggactgtcttatttgtttcgcatgaccggtacttcatcaacgagttggcaacaaatgtggtcgctattgccccgaccggcagcactacttatctgggcaactgggattactatcaagaaaaactcaccgaaactcaggcagaagcagccgccgcagccgctgctcagccaacggcaaaaactgaaactgctggtgcgacctcttaccagcagtccaaagaagacgcccgcgctgaacgcaaacttcagcgggaagtggatgatttagagcagcaacttcaagatcttagccaacaagaggccaaaattcaaaaagcgatgactgcaccagacgtcctcagtgattatatcaaaatgcaaacattgcagacagaactcgaaacagttcaaaaacaaacagctaaagttgaagacgcttgggaagaaaagggcattcaactggaagatatgcatgctgataacaattaaaactgctgttctttaaattcaaaataggcacggccaaagatggtccttggtcgtgccaaactccgcaatctccggccagatggggtggcgacgcgtagctagagctgtgacggcgcttcgagcccatctggcctacgattgctccttggcactggtatctttgagccttaaaaaatatctccgagaaaataataggcgaatgattttccttttacggaaaaatcattcgcctattgttaactgtcaatgatgttccaacaccatttttgttgtctacttactcgaagccttctcatcaatcaacgccaaggcttgccgcaaaaccttttcaccgtccatcatcccataggctcgcatgtcgataacggccataggaatattagtaccagcaactttagcggcaaactgactttccataaagcgtacttgcggtccgagcatcaggacagatacgggttcagatgcaagtttattatcagcatctgctgctgccgttgcgaaaacatcaacatcaaggccatctgcctctgctgcttttttcatccgttgtaccagcattgaggttgacataccggcggaacagaccaacataatcgttttttcagccatgggaatcatcctttcgttaacaagcttatctataagataagtctaaccaaaacagttaggcggcgtcaacgaaatcgctgtcggccttgcatttattatgaagcgtgggtaaagctcaatcctggatcagcattcaagctttctgaagcaagatgctgcttcgcccattcaatatgagcagctgcgccaatcattgcgccattatcacccgtcaagcgaagtggcggcacaatcacatcgacatctggaaaattcacagccaaggtttcgttcatggcttctttaagcccttgattggctgcaacaccaccggccacaatgagttgtttaaccggatactgatgcagtgccttttgcgttttgtgaaccaaaacatcgacaaccgccgcttgaaaactcgcggctagatcttctcgactgagctcttggcctaactgatgggcgtgatgaaccgtgttgataacagccgatttcaaaccactgaagctaaagtcaagattgtcttctttatccatcgcccgtggaaaatggaaagtgtcttgaccaagatgtgccaaccgatcaacttctttaccggccggatatggaatgcccagaatccgaccaactttatcgtaagcctcaccggcggcatcatcacgtgtatcgccgatgatttcgaattccccagctgatcgcatataaaccaactcagtatgaccacctgaaaccgccagtgccagtaatggatacgcaagcggcttcacaaaacgggcggcataaatgtggcctgccatgtgattaaccggaattaatggtaaatgatgagcgtaggcaatggttttggcagccgtcaccccaattaacaatgcgcctactagccctgggccgtatgtgactgccaccgcagtcaaatcatcataagtgacgcccgcttctttcaacgctgcatctgtaaccaacgtaatttgttccacatgatgacgactggctacctccggaacaacaccgccaaatcgttgatgacttttaatttgtgtggcgatgatgttcgataagattgtgtcaccattttcaacgacagccacactggtttcgtcgcagctgctttcaaacgctaaaattaattcccttgctgccacattgttctcctctacaacgacgataatgatcgattacggcaatggccgatacatatcgagtgcatcatcgtgattgctgacataataaccttttttaattttcccgtcctgaaaaccgagcgaccgatacagatgcttagcaatgtcgttattcgtccgcacttcaagcgtcattttttgactgccataatcaatcgcccggccaatcatgaactgcatcaaaaaacgtcccagacccatgtgctggtatgctgggtccaccgcgatgttggtcacatgggcctcacttaaggtaaaccaggtgccaattaatgcgactaactgaccggcatcttcaacagccaaatacaacgaatgccgaactttacgcaactcagagaaaaaagcgtaacgatcccacggtgtatcatgataaatccgtcgctcaatcgctaatgctgcatcgacatcgtcttctgtcatacgccgcagtaaatactctttattgcgaaccgtgatcgtttgtggcttaaagctcagttcatcaggtgtcgtgcgatcgaaccacgatttaaactttctcaacataaacatcatgtcctctgccggggtgtgcttccaaccagttgtgttccgcctcggtcagccgcagataacgcggcacaaaatcataaacagacacaggcggcagatcttttcctaattgtcccaaacgtaatgcttgtggcaagttcagccaactcggtgcaaattgcgctaatccgcccaaggtttcaataatctgagcccgaaacatagccgcatcactgccgacaaagatcaccggctggtgcaaagtggctaattcagtgagcagtagttttaatggcatgtgccgatctgtaaccacattgatcagccggcccttgttccattggtagacacctgtaaacacattgttgcggcgcgcattcataattggcacaatcatcgcttttgtatctgtgatgttggcggcaagcaccgccaaactggaaacgccagctagggcaatgttcaatgtgtaagctaatgttttccctgtcgtcacggcaattcgaatgccagtataggatcccggtccatctgcgacaataatcttatccaagtcctccggctgcaggccactagcagccactaaatcatcaatcgctggcagtagttgctcactatgcgtccgttttcgattaatcgtcgtctgcgccaacaacttatcattatctaacacagcaactgacatcgcttcgtttgaagtatcaagcgctaataatcgcatcaatagaccctcccttctcatggcataatcatggcaatattctatcacaaataagagcagagcgtgagctggcgcgtttagaaaccggaacataagcggcctaaagcctaaatggtcgggtttggaccatttaggctttaggtccttatgtgcaggttgctgcgccagcgaacgcgtttcagtcaagagcgtgagccagaccgctcagaaaccggagtgtaagtgggcctgaacgtgatggccgcgctttggccattgcgttcagggtccttacacgcaggttgctggtctggcgaacgcgtttcaatcaagagcgtgagctggcgcgtttagaaacctccgagctgaacgataactgtttttccttcactccctgagttacttacacacaagcctctgagcctctggtaccaattctattctctattctacgctttggggtttccattactccgagttggctccgcggcgattcagggtggcgaccgcgaagctagagtggtgggcacagctttgaacccgcaaaatgcgcggtttcaaagtctggccttggtctaagcggagaaaaccactccgcttagaccaatgtcaccactgagcccatcgccgctccgccaactctctgttttctaccggaaagcaaaaaccagaaagaccattatcatttatgattcaattatttaaacctacattattcgggaattcccgtacaaacagcttcaaacctttttatgctcaaatcctaaaaccaagcctctcccggattcggtagcatgcctgtcattgctgcaatgagcaggagcacactgccaacaacgagtaaaccttgcagtgcgatttttaaccataaccgttgatgaatgatctcatctggtgtccagtagagatcggtggcgctttgaacaccggttgttttatttgccgccagcaaggcatcatggagccacttggctagccatgaccaagcaacacctgcaatcatggtagccacggccagcacccatagtgcatgatcacgttcagttaaatagtcagtcggaaagacgtagaagttgccgatgatgggtaattgaccaaattcgctataaaactgattgccaatggcatatgcaagcgccaagccaccaacaatactgcctatcagtcccaatcgccgaacccattttgcaattgtattctcacgatacaaattacgaatgtaagtcttgcgtccgctgcgcacctggttcggaaacatcatcttgtgtgttgctaattgcatcgtcacgattcgccgttccagttgcagtgcccaaattcctgtccctaccaacgccaacacaaccacaatgattaatccagcaaacatagcagccagcccttctgttttttttttgagttttcttattctatcagttaggtttcatgttgaccactttggggcacatactcgatatggcagattgccaacaattaaaaaccccagacaagccgaccatcgtgaaagcattcagaaggtcaatctgtctggggctatttttaatgtaaaaatacgatctatgactggcttgttcaaagcgcttgcttttatagcaaatcaatcaaaggtggggacgaattcgctcaatggcttttaacgttccataagacagtgccgtttggattggcaacatgaccacgttcttgatcgttcgcggccagataatgccttgccatggcgtacccatgatgtttaaccatagtgttgtcaaaatgatattgctaatcaacaaaaccatgccgacagcgagcaatgtccgaagaaccgttaccttcttgccgtggaaaaacatgccgtaaagcattgccgcaatggctgcactgatggtaaaacccgggaagttggctcccggactgaagatcataattgacaactgatcgttcagcgcagcagcgccggccgccaaccatgggccaaaataatatcccatgaggatcgtggcaaagaacgctgggctaatcttgagccaaggggttccgaacgagaaacggcccagaacgatttgcatcgccatcaacatggccatatacaccatgttccgggtggaaagcttgggactactaaacgataatacttgcataagctgcaatctccttttttcggagacgcctaaatatcaggcgaatgcggcacctgcaccgcgacacatgtcttcgtctgccgttcacattccgttccggcagcacttaacgcgcaggttcctactcctagattttgtcacgagacatatcgtacaccgaaaattgtggaaagggaacccccgaaatgttcgcattcgcattttttgtgatcacacgtgaaaaatatctcacgattttctcggtattttcttggtttttaccaagttagctgccagattgattcgctaaaatagattctcgtaatcatatctttctggttgctcatactccctgaaaagggattccctcaacacttcattttagaagtgtttttttacacctaattatgggtgttcgcgccattgactttagctgttcgcggctgcataaagagccgtataatgaaatgcgacaacgtttgaaaggaagatatgaccgtgactaaacatattctcgttttgcatacgggtggtaccatttcgatgactgaaaatagcgaaggtgacattatgcccagccaacataacccgttacttggtgctgacagttttgtccctgctgacgtcgaactcaccactgaagaaattttcaacctcccatccccgcacatgaccccagaacggatgctagaactcgttaaacgcatccgccaagcggaaaaagaaggcagcgatggcgtcgtgatcactcacgggacggatacgctggaagaaaccgcctattttcttgatctgacccttgattcggcgatgccagtggtcgtgacaggcgctatgcgctctagtaacgaaatcggcagcgatggtctggagaatcttcaaagcgccattaaaacggctgccagcgacgactcacgcaataagggaacgctcgttgtcatgaatgacgaaattcataccgctcggttcgtgaccaagacgcacacgaccaacgtggctactttccgaacaccaacattcggtccagtcggtttggtcaccaaagatggcgtccgattctttcaagaactgattaatcaagaaatctgtgcgattgatcacctcgtcaacaaggtcttcctcatcaaagcatatgctggcatggatggtaccttgttcgatgcactgcctgaagatacccacggcttgacgattgaagcgctcggtgccggcaatctaccgccgaccaccttacctgccattcaacggctgctggatcgcaacatcccgattgttctcgtttcccgctgttttaatggtgttgcgcaagccgtttacaattacgaaggcggtggtgtgcaacttaagaaaatgggcatcattttctgtcaaggcttgaatggccaaaaggcacgaattaagttgcaagtcggcctcagtgacggcaaacaggggcaggatctagccgacttcgtggataatgctgttagctgacaactaacaaatagctgggactatcctcgatttcgaagaccgcaacgcaaaaacggcactaagcaaacgtctcttttttgcttagtgccgttttactatgctttaaaatcctgccagatcatctgcgcttctgcgttgacctgctcgccggttacgacgcggtgcaaggttttggtgggatcatccggatcatgctgatattgggcaacaggcgtcgtgccatacgcgacttcacgttcataccgaatatccgccccgcgtaacgtatgggtactcaaaaaatcatagccaagactattttccatccattccaagtaatgagcattgttgacgtgtccgttactgtcaatatcaaaatagcggacatgaaaatcttcttggccatctggggtggtgatctttttaagccgcggaaatcgcttgattttgcgatcactgaccgcgccgacacgctccaccagttccggaatcacgtccacaattttgcgggtgcgcagatccatgatgacccagttgctattcactgttaccaagcgctgcccttgcgcatcgtcaatccaataatcccggtaagtaaagaatttattgtaagtcgtcgcctcggtccccacgcgcaatggttcctcaattcgcggcatccgctgaatatccatatgatactgcgtgatcacccaaccagcctgaaattcattaattgcatccatcccggcatgcaacgtctctaactggcgctccgaaatttctaacatgacattcatcatatttgccaatccggcgcgaccataccgatcacccgcaaaaccgggaatccggtaatcatcttcgtagacctttcccattaggatgactcctccttaaatcacacttgctggcacagaatccggttggcttcgcataagcctgtttctaaacgcaccagatctcacgctttgcttatttttccaactcatgatatgcatcatacaccacttgcttcgctaagccattttgtttggcgactaatttaatcgctgcatttggtttggcaccagtggccacaattgcctcaacttgcatttttaaaggcaccgtcacatcaactgctggcttatcagccgcaccttctaccataatcacaaactcgccttttaggtcaccagcggcataagtttgtaatgccgacaatgaaccgcgaatgaaggtttcgaattttttcgtcaactcacgggccaaagccgcctgtcgatcaccaaaagcagtctgcattgctgccagcgttttgccaacccgatgtgggctttcataaaaaagcaaggtggctgattcatgggctaacttctccaattcgcgatttttctccccagctttacgcggtaaaaagccgtagaacaaaaacggctgcggcggcaagccggaagcaatcagcgcagttgtcgcggcgttggctcctggcaatggcaccactggcacacctgcatcaatggctgcgcgtaccaattccttgcctggatcagaaatcgacggcataccggcatcgctgacttgagcaatcgtctcgccgtttgccaacttagccaacagctcaggaatgcgcatctgtgtgttatgttcatgaaacgaaatcgttttagttttaatctcaaaatgatttagtaacatttgcgtgtgccgcgtgtcttctgctgcaatcaaatcgactgttttcagaatttcaatcgcacgaattgtcatatcgcccaagttgccaatcggcgttggcaccagataaagtgtgcctgttgtatgtgaaccgaagcttcgttgttgctccaagtcaattctccccgtaaataatctcagtacaaaaagcgcatggctcatcattgacccggcgctggccatagaacatcgggcaaacatggaagccttcattatacagactttcaagattttgcttcgacttagacaattcaaccccaccatcactagttttattgtcatctttttctaattctgccaaatgttgacgcaaatgcttgttttcgatctcaagttcagcattgcgttcaagcgtttctgccatatcgtccttcatagcggcgatttctctgagcatctgctgggcatgtttttcaagggtcaagaagccatcatataattctttcttttccacaagatcacccttctaatagtttaagcattaactgttctgttgcggattgaaacgtaacattctggctcaatcgcacctgcgccgttaagatagcctgcagcgccgtgattagttgctcacttgatcgctgagccaagacgccgatcgccggcaagtccagttgttgcattgatgttacctgaaaatgttgattcaatgcatcagcataggccaagccgatcagcgccaacacttgacgctgactatcagcatctttagcaatcggcagcagttgcgtctgcacccgaacaaaactttccggatcgtgatccgccaaacgctccagtaactggaaaaccttcgtcacccggtcttgaaatgttgcagacgccaacaaggcctgcgcatcagccacattgccagtcaatcggcctgcgactcgtgccatttgcgaggttgctccgccttcttctagctttgcaatcacggcagagcgatcagggctttggaatgtaataacctgcgcccgcgacaaaatggtcggtaaaagttgatttttcgaggttgcagtcaaaatcacggtcatcccaggcactggttcctcaaaaaatttcaataaagagtttgccgcacctgctgtcattttatcagcatcttcaacaacaaacacacgttgattgccttcgaccccggttttgctcatttcttgcttcaacccgcgaatatcgtcaaccttgatgctttgcgtttctgttttgaccaccatcacatctgggtggttatgattcaaaattcgctcgcactcaggacactggccacatggcgcaccatcctgcacattttggcaaaataggcgcaaggcgatccactcagccaaggccagcttgccagccccttttggccccacaaacaaatacgactgtgccaattgcttgcggtcaatgattcgcgcaaactgagccacgagtttaggctgaagcgaatcaattaaaaacttggtcatcagaagcgatgaaaggcttcgatcggtaggacaaagacggtggcaccgccgacttgaacctcaaccggataggccatcgaactgtcagacgtggcgtcaagattgactggcggtgtcatgaattgttggcgggtttgggaagtctctttgataatcttcagaacttcatcgacccgatcgtcagcaatcccgataatgaaggttgtattaccggctttcaaaaagccaccagtcgttgataatttagttgcctggatattagcatcaataaattgactgctaagcaagttgctatctttatcttgaacaattgcgagaattaatttcatgcgtgccctccttgaccgcgatgacggttatcatttagttaaatagttccggaaaacgacgagtaatggtctgaaaacaagcggcaacaaccttttccagtggctcagttgcatcaatcgacacgattcgctgaggattatccactatcagtgtcatgtatgcatcatgaacgcgttcatgaaaagccagactttcctgatcaagtcgatcatattgacgctcgttttgatgggacttgatacggtcaagtcccacctgaactggcacatctagatacaatgtcaaagccggctccagtcctgcagtggcaaattggttcattttcaaaacggcatctggcccaatttctcgaccaccaccttgataggcaactgaactgtcgacaaatcgatcacagacaacaatgtcgccttgtgctaacgctggttgaatcacttcaaccaagtgctgtcgacgcgacgccgcgtataaaagtgcttcagtccgcgcatccatagcagtgttggcagggtcgagaatgacctcgcgaatggtctcggaaatctttgcgccgcctggttctctggtcaaatgcaatggcacccgcacgtgctgttcgagttgcgggatcaacgtcttcaaaacgctggtcttgcctgcaccgtctggaccttcgaatgtgataaatgtgcctgtcactatatgccgctccttctctaaacgcgatctctggtgcagaaacctacacataaggaccttggtcgcaatgaccaaagtgcggccatcacgcgcaagcctgcttatgttccggtttctaaccgcaccagttcacgctctttttggaattaagtccattttacttgatatgtttcacaattaaaaacttatctgcaaattcacgagactaataagtcgttatacataggcaaaaaagcggcaaatgtcatgatcctgaaatggcagtcatgggcatttgccgctttagtgaatgttgattggtatcgggtagctgcacgatgccctaatggtgaatgagttatgcttggcattgaggtttttgcatgcctcctaggaaggcgaaaaaagatgccactcggcgtagcgaatgattggcgcgttgaacgttctcttgttggtacgtggaaaagctctgttaccccttcacgactctctgaaccgcgcaaaaaagcgcagaagcctccgtgtaaggactttgaaccaaaagagccaccgcccatcccttttggttcaaggccacttacattccggtttctaaccgcgcttttttgcgctctataaatctctatactccgcaatttgctccgcagccactcgggccacaagttcgcccttgatttggcgggtgcgcgcttcgcggtagagaaagtcgaataggcctgtctgtaaggctacttgcgctttggtttgttcgtcgacttcacgaaaagtagcaacgagcttgcgttgtgccgccatctggtcgcggacgcgatagacgagcatcattagttcttcgtctttttcttccttgacctttacctgtttgcgtccaaacattacagctcagtccttccttcaaccgccttcatcaaggtcatttcatcagcatactcaatatcactgccgaccgacagcccatgggctaagcgagtgaccttaataccagctggtttaatcagccgagccaggtattgggcggtggcttcaccttcaggcgtggcattagtggcgataatgacttctttgactgccttatttgccttaagccgttttaacaaactctcaatattcagatcttcaggaccgcggccttcgattggtgataaaacgccatgtaatacatgatacaagccatgataatcctgagcccgatcaatgctcatgacgtctttaggttgttcaacgaccaatatcgtgctttggtcgcgacttttatcgcgacaaatagcacacggatcctcatcggtaatgttgccacaaatggaacaataatgcagatcctcttttgccgcgacaagacttttagcgaacgccgtcacatcgtccttattcatatcaatggtgtaaaaagccagccgtgtcgcggtttttgccccgatacccgggaggcgcatataactgtcgatcaatttactgatcggttctggatattgcatagtgtcccctcttgttgtgaaaacgtactgagtgatgatcttgctgtcatgagaacagctttggtttcaaaatgatgcttatttgcttatgttgctgaaactttgggtggcgaacttgggttgttgtaaaagttcggtttatgcggtgaagacttcttgatgatacttgtggtccattgtggttctctgaaacgcgcaaaaaggcgcagaaacctccatgtaaggaccttgaaccaaaagggccaaagccccagcccttttggttcaaggccgcttacactccgttttctaaccgcgcctttttgcgctctgttgttacattggcaatccgcgtgtatacttgcccatcttatcttgagtttccttatcaatggttcccatggcttgattaaccgcttctataatcaggtcttggagcatgtccggatcgtctggatcgatggcttctggtttgatttgaatgtctttcatgatcttttcaccggtaaacttaacggtgaccatatcggaagctgacttgccttcaaattccgttgcatacagttccctttgtgctgcctgcatttccttttgcattttctgcatctgcttcatcatgccttgcatattacccattccacgcatgtttcatcatccttttctagtcatttttgattgttacgttaggtgcatctttaccaaatagttctgttaatttgctaacaactggcggtatctgcggtttagtgtcagctttctgttccttgttttcaggggccttcaattcttgaatataatcttgtcgaatggttggccagacatcactttgaaccaaaacaatttttggctgcttgccggttaatttttgcagaccactttccaattccgtcatcagcgcagcatcattcatggcgcgttcaacgtagatatcataatcgaaactcacgatcacaccgttaggactggcagcaaccggttcactgactttcatcatggcgcgtttcgtgatactaagcagacccagcagattcggccaaacatcctttaaattggtcaggtcctgtttggttgcggcacctaaaatcggataaatagctttacgattgacatggttggctttggccttcacatgtttccgggttctggttggtggcggaatggtgccgccgttcgcctcaacccgtttcagttgatcactcagctgtttgacttttgccgtcaatttttcaaattgcggattttctgcctgtgctggtgctgccgtaacctgttgcgttgtcgtttcgcttaatcgaaccgttgccacttctagataaatttccggatgattggtcatccgcagttgttgctgcgtgctattcaacacgtcaatcatgtggtagatctgctctggcttgaagttctcgctcagaattttgaattgatcatcaagtaagcttttttctaaatcacccaagagtgtcggtgcttgttgattaaccaacagatcccgcaagtattcaatcagatcttcgattaaccgcccagcatctttacctgacgctaacaaatcctcgatcattttcaatgcctgcgcatgatcctttgcgaggaccgcggctaaatacttgcccaaaacagcagtggtcacaccgcctgtgacatcaagtgcatcttccgttgtgacgtgattatcgccaaaactcaacacttgatcaagaatcgataaggcatcccgcatgccgccttcagcagctttggcaatcactttcaacgcagcatcgtcgtatgtgatttgcttatcatccaaaataaaacgcattcgcttaacgatatcttccggcgtgatccggcgaaaatcaaatcgttgtgttcgcgaaataatcgttgctgggattttatgtggctccgtcgtggctaaaataaacaccacatgcgccggcggttcttccagcgttttcagcagagcgttgaaggccccgctcgataacatatgcacttcatcgatgatatacactttgacgcgagcttgtgttggcgcatattttgccttgtcccgaatgtcacgaatctcatccacgccgttgttagaagcggcatcaatttcgataacatcggtcaaactgccattattaatagcctgacaaatttcacaagtattatctggctcaccatcctccaagtgtagacagttcagtgccttggccagaatcttggcgaccgatgttttaccggtgccgcgggggccggtaaaaagataggcgtggcttgtctggccagtaatcagcgcatttttcagcgtcttggtgatggcttcttggccaatcacatctttaaattgctgcgggcgccacacccgatataacgcttgataactcaccgtgccgcctcctttaaacacgtttgctgacgccgtcacctgctcataagggcctcaggtgcaatggccaaaaaccagccatcacccctgagcccgcttatgctccggtgactaaacgcgcccgttcacgctcttcttagtgaaatattcgctgtgttctagtttaccatagctgcctcatgagtagacagaatctgcgacaacaaaaacggccgctccaattacaagcgaccggtcaatttctcaataacaaaaggcacatgacgaacctaccttagtgctgcttccttccggacctgacacgattcggaaagccaccattgccttaaggcctttcggcagttttcattataactgattctcactggtttgaccagcccgcttggcggcttttcttttggcccggatcgttcggaaaaacgtttgtagcaacgtggcgctttcatcggctttgatgccgctgaccacagcaacttgatgattaaagcgggtgtccgccaataaattataaaaagtgccagcaacgcctgctttaggatcagtggcaccaaagtaacacgtcgccacgcgtgcattgatcatagcgccggcacacattggacatggttctaacgtgacaaataagctgcaatcttccagccgccatgtaccaagcgttttgcatgcggcctgaatcgccagcatctcggcatgatgcgtcgcgtcttgagttgtttcacgcaaattataaccacggcctataatctcgccttgatggacgatcactgcgccaatcggcacttcgccgattgcagcagcttttttggcctcggttagagccgcatccataaattgattgatgtcgtgttcgtccatgattgccaagcactccttgttttatcattctgatgccaataaatagccgtccatcaggaaaatcctcatggacggctattttgatcacgcagccagtttatttacctgacgtgtgatagccacatgtcgctaaactaacggctagtgactcagtgctgcctttaagcgatcaatggctgccatgccttggtcgcgagccgatccggcatattcgctagcactgtcttttagactgcgcagcttatcgctaacccggagcagactggcaacatcatcatcgctcaatttatctaaaacggtttgaacccgatcactgtcgccaaaaatcttcttcacgaagccttcaacctgacgccgctggtgctgccgttcaaaatattcagtcaaacttttggcacacacaaatgcccctgctgcgattgcggcagcggccactgcaccacctaatgcgagatatttcgattttgtcatgtcatattgctcctttctgtcctgacctgagtgtaccacgcctagtataaaaacacttattttgtcgctttaagaatatagtacccgtgttccttttttacaatgctggcatctggataaattgttttcatcagtttcaatgcagatggcgcaccttgtttcttttgaatcaccgcatataactcaccatgcggcaacaaatgctcggcagcgccggcaagaataccggaaacgatggttttaccagcacgaatcggcggattcgtcacaatcacgccaaattggccatctatctgatcatacatggaactttcgacaatcgtgacattgctgatagcgttatccgttgcattgcgctgtgccagggcaagtgcacgttcattcacatcactcatcgttacttggcgatcaggaaagtgcttcgccaaagcaagcccaatcggcccgtaacctgttccaacatcaagtatcggtcccgctggcaattcttctgccagtatggttgcgatcaaaacccgactgccaaaatccaccgtgtgtttcgaaaacacgccattatcgctggtaaagcggagcgaatgcccacctagctcaaagtcaaagctgtgctcatcatgggccaaatcaggatcattcgtataatagtgattcaatattggtgcctccttgttttgcgcagcgctaaaaattatctgctagccctcagccatgaaaaaggactgtcaaagaccatactctaataacacctaacatccggttatttgtcaatgccttgaccgagtcggctcacccaggctaaccgctttggccaccacttgttcggcgttgcaaaagtgaccttctgattcacgaccatcatgatctgcagcaacgtgaatagcaatgacgtccgtttacgataagcaacgtacttcggtacccactcagtcacatatttatttttatacgagcgcaatccttggaatccataaaaccgataaccgtattcatacacaaggtgagcaatcttttcttcaataaaagaataactagacgtaccgacattcgccagcggggccatccccatattgaaatacttaaagccgcgatccttggccaattcaaacagatgaataaacacttcatccataataccagaaggcgcatcggcactagaacgcatcaaatcaatgctagtgacctcattattacccgtcggcatgtcggtcgcaaacgccacaatcttgccatccggcgctcgcacaaccgcaatcggcgcctgattcagataatggcgatcaaagaaccccaagctgaaacctttctcactgcgcccgtccaaccatgaatcagacacggtttgaaggtcgtctagcaaagcatcatcaaacggcggcttgagcagctcgacactgtagccttcacgctcaaacttgtgcatgagcgcccgctcaccttttcgcttcgtgccagccaatgtaaaggttgtcacatccacataaccttcttcaccaaacttcatgaagtcaaagccaaattcatgcaatttcatcgtaaggctttcattaatctcataaaagactaacgacatgtcctgatcatctgcctgcttcataaagtcagcaatcgcggctggaatttgggtctcatctcccaccggttcacccatgacaatgagtttatcggccttctttttaaacaagaagaacacgcgatcttcaccgtccacttgataaaaatgcagcgatttatcacgcatcagtcccagatggctcacttcattcccgccaaatttagccacaaccgccttcaaacgcgcctcatcgtaaggatcggccagcgattttgtcggcgcggacaaatatcggaagatgagatacaccgtcagcgcggccagcatgaccccgatcaaggtagtgaagaacatccgctcagacgggaaaaggaaaacatctggcacatgccggtgatgaatggcaggcgcattatagaacacagcaaatgcataaaagataaatgtcaagccaaagacggcaccatcaatcagcttgttgccccacgacagcgccaaccggtctctggtcaattcacgacgcgtcaagataagcgcaatgacgaccaaaataaggaacacgataaagcgcagatgattatcctcgcgcaatgacgccaccatcgccacaatcaacacaatcacagtcggccagtaagcgcgcttcacgcggctggcaatgccacggccaaagccaagaattaagaaagccacaatgacatttgtgacccgatcaaggaataggaaggtgtagggataaaggcgctgatacaaggtgttttgaaaagcaagatcaggcgcaacaccgcgcaagagcaacataatcccagaaaaatacaggaaaaccactagaaagccgaatgctgctttgcgaatcaactgcactggtaagccttcaaggtaagcattcaatcgcttgccagcatcttgcgcaaacaaaccggcaccaatcaggaacggaatgacatagtagaaaagccgatagaaaagcaaccaaacaacggcggcactgctgtccagacccaactggccgagttcaacaatcattaacacatcaaaagaacccaagccgccgggcaccattgaaataaccccgatgacattcgccaccatgaacaacggcaagacagacgatagcggaatgggcgcctcaagaaaataaccaatcaaaagaaagaaagcagcacaaccgccccattcaagaaatgatcccagcgtcaggcgcaactggcgtttgagtggcatatcggcaaaaaattcactatcacgcacatgggagatgatcatgagcaatgggaaataagccgcaccgcccacgagccagacccaatagttagcaaactccgccccaataccaaaaacaaaaatgacgacaatcccgatcatggaccaaagcgacaacccagccaacaaaaacatcgcgatttttgaaatcgcaaatagcacctgcttttgagacgctttttcatggtaaaagtttgcccgcaaactagcacccagtaacccaccaaagccggcaatattggtgaaggtgttgacaatccagcctgatttaatgacataagccggtttgtagtgccctggtaacaattcagtaatcacaaaatcataagttagcatcggtgtaacggcgatcagccccacaactaacaaaatcaagagcgaaacagggctttgcgtggcgaggctcgcccgcatttgttccccattcaagtcttggctgatccggccaacctcaaaaatcacaaacactaggactgctagcacaaacagtactttaagtgtggtgagatgtttctttaaaaacgatccggtttctcggaatagttttttcattgctgcgtcctccgtgtctatattcctattcattataggaaatctacaagcccctcgcaccctttctgacctttttgtaaggtgatgtaagtttgcgagatgattgaaaaaattttttaacttttttagttgaaaacgcttgacctgaaacgcgttacagaaattacactcagtctagagtcaagagcgtgaacaggagcgcttagaaaccggagtgtaagtggcctcaagcctaaatggctgggtcttgtccatttaggcttgaggttcttatgtgcaggtttctgcaactgtgaacgcgtttccgcccaagcgtgatccgacgcgcttagaaaccacatttaggcaatgatctcaatcaagtcaacagttattttcaatcaactcataggaggtaaacatcatgttaatgcaaacacatctttatcaggaacttcctgtttatcaggatacgcaaattggcgccttgaaggccatcgctctaaagttgaccaatgatttcaattttgattatcaagaggttctaagttccttgttagccagcgcgggtgagcaaacgcaaaccatcaacgatcaggcaatcttaacttatggtcatgtcaccagtttgacagaacctgttgttattggctttgattttggcaaggctttaccttgggccgctggtcaccaaatcagtcaggcgattgtcttgttagtccctgtcgacacagctgaggcaaccattcaggatcggcttcaaacaatctccgcggcaattgcacaagatcaagatttgaaaacaatgacccaaacggcaacagctgcaatcgcttagtcatgctcacaatgagctactgcattaagatcaacgtttatgtcacaaaagtcggcatatcagggtctaaaacaaaatgaccactgacatgtcggctttttgtacgcttggctttaactgcttgttatactggaattggaggtgcttttatggcgaatattcatgacattgctcgactatccggtttctcaacggcaacggtttcgcgcgtcatcaatcagcaacattatgtagcgccttcaacccgcgcagcgattcaagcagtgatcgatcaacttgattacgtaccaagcacaatggcacaaaaccttagcgcaggcaaaacgcggacaatcggggtcatcttgccgcacaccgatcatccctattttgaacagcttgtgaccggcattttgaatgcagcaatggccggcaattatcatgcggtgatcctgccatctcgctatgatcagtcactcgaacaagactatttagaagacttacgccgtcatgcatatgatggcttgatcttcacgtctcatggtcttggcctgcgcacaattgctaagtatcaaaaatatggtcctattgtagtttgcgaaaatccgggaaaaatcaaactcgccgccgcttacgccgaccgaacacctgcttatcaagaggcattccagtggatgggtaaccaaggctacagcaaaatcgccttgctgctaagtcggccctatgcccaaagtgcgactagtaaacttaccattaacagctatgtggatgtgttcggtaaacgtcctgctgacgaaatgattgtctatcacatgcgaaccttcgaagatggctatcaagctggtgcgcggttagtcaatgagcatccagactttatcctcggcaatggggacgatatcacggccggtcttcgccagtacttcgtcgaccatcacctgcccatccctcctttaatgggtcaagagaatcagctctccagtcgattactgcaaatgagtacgatcgatcatcatgttacagccatcggtgcagcagcgttaaaactggccttgcgcgatgacattgctcagacggtgattcaatccgatttgattttacggtaagtatatgacaataaaaagcagcaacctgccatggcttcaaagccatgataggttgctgcttttctttttgtcgatacgctgctgccctaaacgcaacgcatgaacaggctattcttcacgttgtttccgtttcaatcctaatacccccatcagactgaccacaatgacacccaagaagccaaacgctggccgctcagttgtctctgctgtcttgggtaatgcccccttaccggatgtatgttgaccattacgatcagtcgtatcatccgtgctcgttgacgtcgttgtggctggctttgttgggatattaccgccagaactaggctggctgccctcatcgcctttgtccttacctgtgtcgcctggagcgggcgccggggtaccttgaccgccgcctttgtcgctagtaccggttgtatcgtcgcctttaccagctgtcttggccgcttcaacggcagctgccaccttcgttttcagactttgcaaagcttgtaaatgtgcaagcttgtcaggagcatcagcactggcttgaccagacgtcaatgtgtcagcaatgtcggcataccaagttttgccagttgcagcatctttagcattgccaacctcagccggtgttgccgctttaataccctccgcaagttttgctaatactgcatcaagtaccttggcaagactcgcttgaagctggtcggccgtttgcgtgcctgcttgagcttgtgccactagatcgtctaacgctgccataaatgttttgccagtgcttggatcagtttgattgcccaagtccgttcccagcgcagccttcacagattgcaactggttaagcagcgaagtcttcttatctgcaggtaatttggcagctaattgattgatcgcagtttgcaggtctcgattggcaccagtaagtgaatcaactgaggcgtccgtctgatcaagcgccgtttgtgccttctgcgttgctgctgctaaagcagtcgttgtggcatcatcatacttaccgctggcacttagcgttttggcggaagcaatcagattagtcagtgcctgcttagctgcctgcaattgtgcaggatcatcagtcttgatattggtcacaacatagtcgacggctggtgattcattaccgtataaatcagtcgacttaaacttgaaggtgccatttgccgtgaccgtgacaccggctgccggcacatcctgatatgtcttgccaccatcagcactatactgaaccgtttcacccgttgcggcagcgtttgccgtcagagtcaccgttttggctggttcagtggtacttggcgtcacagttggtgctgccagtgttttctttggttcgtagtaaactgtgatcttcttggtcgtggtgttgttttcgctatctgtaacagcaacagtcagcacgtttttgccttcgagcaatttaacgggctgatcaatagccatatgacccggtttgccgctattgatgttgatgtctgcgtattggctggcgacatgactgccgttaattgccagactcagatattgtgcattgtcagtggccgttccggtaatctggaagttcggatcgttggtataaaccggtgcatctgtcgagctgtccaatgacaatgttggcgccactgcatccaaaatgaaggtcaacgcttcttggaaggtcttgttttgagtggtgtcacccacaacaaccccaaacgatttttgtccaagagtacctaaatctaaagtgaaactgaaagtcagatcatccttgattggaatttgcttaccatcaacctgcaacgttgtcgttgggtgcttgaccttaccagtaatcgtcgcaatcccggtcttagggtcatagaacttagccgaggtggcattgaattcattggcaccaaatgtcacaccttgatcgaacgtcacagcattcttcaacacatcaggatcataagacgaggtaatcgtcttttgctccgttgtggtgttgccgtcttcgtcggtggcggtcaccttgatggtattgtcaccataattaaccggtacatcaacactaaagtgatgttgtgcatcaagtgctgctacggtgtcgccaacattaactgtcttggtgtcagcactaaccgtccctgtaaccttgatggtcgcttcggaggtctgatccgagccattgttgaatttcaaatcagtaaaggttggcgccgtcagccgaactttggtgtcaaaatgtttaagcaactgggtgtgcgccttatcggcatatagatccacttgcgcggcgtaatcagcattcgtgaccgccattgaggcagtgaaactgttagtcgcagcatcgtaggttgtgttcaaatcatgtttctttccttgtgcatcagtgtaagtaccgtcaaccgctgctggatacgttccactaaacgtatacgtcccgtcaccttgagtattggcttcgtagccagttgtggtacttgagatcttgtctgggataccgccgccgttcacaattaaatcaaacgatgtagaccccggcttctgaacgctggcatcttgatcagtggcattggatgcattatcagtcaagtacagctcagccgaattgtcgccattgccaagtgcttgggcctgttcatcagataatggcgtttcaattttggtgtacccatcagccgttgtcccagcatcggtaaaggtagcatcaagattcgtcacttcattaattgcagttttaacgctcttggtggcatcaagaccactcaaatcatccttggcttcagctgtcaaataatactgggttttcccattttccgttttggctgacaaagcgacatgacgaactgtcggcgccttagagtcgagcttgaaaggcacatcaaacacttgacgtttgtcgccgccttccggtacaccggaaatacgataagtataactgccatcatcagccgtcttgatgttgccatcacgttgatcataataggtgccatcccacgctggagcattgtagtagatgtacttctgcgaatgagcatcataataggtcttcgtctgattggtggaactgctgagagtcgtaactttattgccctgaccatcaagaatatcaacttggacgttgctgatattgcgcaatagataatactgcatgctgatgtcattatataaggcattcttgtcactcgaaaaagcaatcgcctgatcgtcaactgtctgtttgccatcagcgtctgtgaccatgccgccataatattgatggcctgtatttttgttcgtcaatagtggcacggtgccataattaccaccagcaggactataagtgatcccattgagactatcgacaatcttaccgtcattccagtcaccaaaaaagcccatgtatggcaagttcaagcgcgacccatcactccccttaaagttcagaaaaccttcaacaaattgctgttggtcaaaagacttcggcaaagatagtgtgaattcaatctgcgccgttttcccagcaggcacagttatgtcactgccggctttaatggctgctccatcaatcttcttgtcatacaaaaccccagaattagggtcagtcgctgatgtataaacggcattagtatccgtattactgtccatttgataggttagttcatgggtcgtgcggttcgtgaaggtcagtttaaaggtcttgtccgtactcgtgaagtctttcaattcaactgccgggtagccgttttcggcgacaaccgttgacggattcttttctaatgcatcaatggctgccttcacatcaaccagaccggcaccttgccgccgcggcgatacgataacattgttgtagttaatatcgttgattggctgggcagtattcatctcaactgtcttaagaaaatcggtgagcgctgtccctttaagttgtttgtagtcagcataaaatgggttgtttttgttattcaacgcttgtttcaacaatgcttgtgaaccggcaataaatggcgaggccattgacgtaccagacatatttgtgtagccattgttgttttgcgttgaccagatgttgccgcctggtgcggtaatatctggtttgaaggaaagattggaaactggcccataggatgtgaagtcagacatcttgtcttcagtatatttctgatttggtaacagcgtcagggcaatcttgacaccgagactatcatccgggtgtgctgtgacccagtcaaccagcttttgaccggttttactggagagcccaaatgttgggaaggtggtggttaacgtaatagaagtcaacggtgttgctgtgccatcgttgttgacaatgatcaagccagcagcaccagcggcttgggcgtatttttgtttgtcagcaaaggtaagttcgccacgtttaacgatggcaattttgcctttagcgtcagcagtatagtcggctgctgcccctttgctgaggtcgccactagcatctttgacaacataaaacttcttttggtcaaagctaccagtgaaatcgttgcttgaaagctgaatggtttccggtccaagctgtaactctttaccatctgtaatggtcactgcctgactgatgacatccgtgttctcagcggaagcaactgtggtcgctcctcgtgatgtccctggcgttcccaccatttcattgtcttgcaaaccgtaataatctttgttgacgccttgagttgctgaaccggatgttcctgcgttcccagcagaaatgacggcggctgttcctgattcgttagcattttgcaccgcagcaatttctggatcctccaaggtttggttgcctgaatcagatcctaaggacatgttgaggacatcggcaccgatttttgccgagtcttcaatggcagaaaccaaggtagctgacccggttgttgcagaagtgtcagagttggtgaaaactttcattgccagtagctgtgcttctggcgcaactccgacaacagacttggttggatcgtcacctgtcccgttagcaccgatgatcccagcaacatgcatgccgtgttgttcgtcaaccgtatcatctgtaatcgtgtcgttattatcagcgtaattaaacccatatggcacttttgaagtaaaatagcggccatgcttggcggtatcagtgaatttttcaacatcagatttggttagtttgacgtctttatcatcgcttagccgcatgtctttatgtgttggatcaatgccagtgtcaataaccgagacaactgtgccttcacctttatatttgtaattggaccatacggcctgcacattcgccatcgagttagccttagcatcagtcggatagtaaactttcgccaatgtgactgttttaactccggcaatttgtttcagtttagggatatcaacaaccctaactttaattgaaaagccgttaacgacatagccataactttcaccggcagtttgttgggtgacttgttcaacagctgccttaacgcttgcctgagccgcgatcactttattggtctcctgctgaatctccgccgtgctggagtaatcagttcttaaagtgccgttttcagaggcaggcgctgcgctcatttgaacaatgacgtcaacataagtatcttgctgctgaactttattcagcttattgtaatcaatacctttagccgccaactgtgtagcaatcgcttgattcgttgtcgctgcggttgtgtcagtggccgcttgcttagcagtcgcggccttaaccgtatttgcgagtgatgatcccttagtttgctgcgagatagccgcctttgcttggatttcgccgactggcaagacagccagcgcccctaaagcgactgtaccggctaacaagatcgatagccctttctttttcctttgcatccaataccctccacttcccaaaagtttcagaaccaaatcaaaccctacgcttgatgtagttaagattatatactctcgaagaacagattcaacgaaaattttaatcttttattaattttcctatctgtaaattagcttttagcgttattatttagccgtttacagactatagatgttttgaaagttttagcattattagaaaatgagtatttgcattgaaattctcaattgccaacgctagaataaatacacaacgtttactgtaagcatttcagaggagaccgagtcgatgaagaaaaaaatgcgccttaaagtattattggcaagtaccgcaactgctttactgctgctaagcggttgtcagtcaaatcaggccgaccaaacagttgcgacctattcaggtggcaaggtgactgaaagtagcttttacaaggaactcaaacagtcaccaacgacaaagaccatgcttgctaacatgctcatttatcgtgcattgaatcatgcctatggaaaatcggttaacactaaaacagttaatgacgcctatgatagctacaaacaacaatacggcgaaaatttcgatgctttcttaagtcaaaacggtttcagtcgcagtagcttcaaggaaagcctacgaaccaactttttaagtgaagttgcactgaaaaagttaaaaaaggtttctgaaagccagctcaaggccgcttggaagacctatcagcccaaagtgactgtccagcatattctaactagcgacgaggacactgctaagcaagttatcagtgatttagcagctggcaaggattttgccacgcttgcgaaaactgattccattgatactgcgactaaagataacggcgggaagattagttttgaatcaaacaataaaacgctcgatgccacatttaaggatgctgcctacaaattaaaaaatggtgactacacgcagaccccagtcaaagtgacagacgggtatgaagttattaaaatgattaaccatcccgccaaaggcacctttactagcagtaaaaaggcgctaactgccagcgtttacgctaaatggtctcgcgattcaagcatcatgcaacgcgttatcagtcaggtattgaagaaccagaatgtgacgattaaagacaaggatcttgcggatgcgctagatagttataagaagcttgcgacaacgaattaacgcttaaccgagtaagatgaaataacagccagttcttttagaaattggacatcaacgccccgaaagtcatagcaacatgactttcggggcgttttatgtataaaaaaagcatctcgtctttcgcggtatcaccacgattgagcgagatgcttttatttgaagatggggctaggttatttgagggtagtaacatcaccctttgatacgcaaggaatattaaacgaatgtaccatatttgtaccggaaatccatgaaaactacgctttcaacgcaaaaaagccctccacccgcgttagcgagcagaggacttttttgttacctgatgtacaggttttcgcctgggtagatcagacggctgagagcattttggctgccttgtaaatttcagggttgcttagcagagactgcatcccagccgtaaccgtttctggatcaagtgaaacatgctgggattgactaatatcagcatcattctttaactgctcaagagacgaagcgtcaatacggatttccatttgctactccaatctgtaatcggtcgagtggttcaccaaacacaccagcatacgtgtcagtgtactgtggcaggctagtgccatcatcacacacaacgccgagccagcctgcccgttgtgtcgtctggctgcggtagtacgcttgctgatatggttcaccgttaggggtaagaaagatgatttgaaccccgtcaatcgcttcaccagcaataccggcacaaccattgaccgtatcattgcgatcacctttggttacccaaggcaaccaaccactcttaactgtgtgaactcgatacttaatgctaccatgatcaactttgatgtacagcagatcatgctgatgattaggcataccagcaaaaccgttgtcaccggagccgaagttggtcacctcatccagccaactgccaccgagcaaatgcaaactgtatcgaacgttcacattaccagatgcagtcgcttgcggacgcgcgctttgtgctgctggtgcactcggggacggattgacagtagttgtgccattagacagatctgccgccaatttctccttcgtaataccccatcgagccagatacccatatggatcagtatgatcaccccaaatatgctgcgttacccacaaatgagacttgatgccaggcgttccagcaccgccagcgtccaaactagtcggaatgccatattgagcagccatatcacgtgcaagctcaatataaacggcataatccttcttgaaagtttcgggattactcgtgtggcccaattcaatttggactgggctgttagcatttgccactgtcccagcgccccactgaacatagccgggttcaccaacttgataaacctgaccgccatcacccacaacaaatgccgtatacgcaacttcagcagcaatattgtttttgaagtaagcagcatttgcacgcgcaccagattcagcaccaacatcatgtaggataatgtaaagtcgattagctacttgcgatgaaccttcatttgcacccaaagcaaattctttgttgatggtataactcatactattttacctcctcgttaggcttaacaatttgataaacgccaatggatgaaagtcctgacagcagtcctgccatcgcatacgcaccgattaagggaagatggccaaaagccatcgcccaaacgcaggccagtaaaatacccgttccaattgatagaacgggtagcagtttgccctctgcaggtgtatatcgtttgaagatttcggtgaaaccagtggtgatcggtgcgatgacaaccgcaattgctagcacctgaagtagttcattttgcatgtcttagttcctccaattctcttgttaactgtaagtttttctttttcagctcttcattttcttctcggagcctgtcgttgtctttattcaccctgtccagcaaatccatagcctcatcgtgcttgttcttccgtttaccctcgcggtaggtcataaaagcgatgagagccgaagcaataccagcaatgtatggagcagaactgacaataattttagttatcgctgctgtcacggctgtcactccttcgcgccagaatcagaacgaaggctgttatgattgcattgctaatccaacttgagtagattccagttgaaatcgaggtcagtaattgcagtattgtcaagaacgacattaaaaagctggtagtcgtaagcaacagacgattggtcaccgctaactgtgtttcccatagcacccaacccccaatcccgattccatcaatgacaaacaaaaaccccacaatatcatcgtttaaccagtcagagtaatgtgggggccagacgaaatactggtcattgatgatcagaaacaagccaatggcaaccatgccaatggcgagtgctgtgtgtgtcgggtgatctctgattttgttaagcattgtcatcacttcctttcaataaaaatagccgctagcttttgctggcgacatagtcactgcctgtaatttgcttgtattcgtctggggtaatcattaccggtacataaggcgttaaatcaattccccaactgtaaagcagcacacactgatcataattagtcacttgatttcgccgccttcagctgcgctacttcaagagtcaaattggcgagtagcatctgttctgcggtcggtgtcacttgaatagccgctttttctagcgctgcttgcttatcggtatctatcacaacagtaccgtcatcagccagctttgaggcgccaatggcaatctttttcagttcttccggtgcaatcaggatggctttctcatcatcgaatggcgtttgccactgactgccgtcccaaaattcctgctggtagccagtgatatagccatcttcatcagtgctaaaaattgcttttactttgtcaacttccatagcaacctcctaaactgcgtatacctcagtcataaccgcttgtgcacgcgatccgcccttgttttcatcagaaccaataatatgtgtgtcgtcataccaaagtgtcttagaaatggtcccaacattaagcatggtaaaggtgactctcaagtagttagcgccggttgtgttgtaaaccaacgctgcctttggtaacagcgtgaacgcatagttgttatacgtcggtgccccgttttggaaatagctccaagcaattagccatccggataatgtttttgaaagtggcgtcgatattgttgcattatcaacctgagatggatagaaagccccatgccacacaagcaagttattatttgctaattgcaagacttttaaagcgtctaaactgcttgtgatccactccaacggcttgttaatggcagtttgatagttgccgcttagcgttaacatacctaacgatagttgcgcactatccattagcgtgcctttgttataaatttgacttagcaagccaaattggctgagttcggtatgtgtcacctgactgttgtcattatccgaatacgtatctgtgacgatcttgccatcggccattgtggttgtcccgtggacggtatagtcagcaacgccatcgggtttgacgcctttaaatgaagaaatgaacttagacccggtaaaagtaaccccgttaaaagtcataccattaaacgtttcggccgaaagaatcttagcgtcgattttataggggttccatttagtcccatcataggtgtaatatcccgttacaaccccgctgctatcagtcagccaatgcatatccccctttttgggacctgatggatacgctgcaccaacagtaatgactggcacattatcgctaccgtctttgccgtcacgaccatcagtgcctttgaacaatgcccatgagtattttgttgggtcggtactatccgcttgggtctggtcaacatactggccgaaataagacttaccattgccatctgtggttgaaaagtctcgtttcccatcaatgctgttagcataggctgtatgaaagtaactagttttgccatcggctcccttagggcccgggacacccacaccatcgtcaccttttggtccctgaatcagtgcccactggccagcgtaatctgatggatcatcgcttgggactgatgttttgcttgaaaaaacaatagccatatactttttaccagcaggcaaggcactcatattggtgcctttatcgtcatcagcgtaacgaacccatggatatttttctgcttgttttgccaagccgttaatcattgcaacaattcttgggtcaagattggattcgagcaagctgtagttaccaaaaacagcagtatcactgtttggcactgtataatgatttttgacttctaacacacgggcgcttagataaactggcggatgatagttgtggtgagcaatttgcacataatctccaatatcggccttaatatcaacaacatctgcttcgtaactttcttttggcgtattgacagattttaatttagtaatcgttcggttaagcaattcgtttggattgcttgtatcatagctatagttaccaacaaggtaacctttggtcgccgatctgttttgaggatcaaaagctcctagacgagcccatgtttttcctgccacgcgatcataaaccactttgtcacctcgcgggctaaaaaattggccgtcatcataggcaatatcagcaaatgtgattgggtcttgctcttgatctgtatcagtagttgatgtaggcgtactaccatatcctgccatggcagtgtgcaacgaatcaattgtgccgctggtcttcagcgccgatagattgactgcatccacaaatcgctgttgcgtctttccgttgccaattttcttccatacgttgacaacctgttcagtaatggtcgatccatccatcttgaccacaaactcaagctctgctccatcaaactcatttgcaatatcgccaatgcgcttcaacttggtatcttcttgaccatcaaatgacaaagttctggaaagcgttgaaatttcattgatgcctagcgtccatcccgtatcggccaaaagttcgttagcatagtaagcaaagccatgtggttctgtatatgtgactttgtctgcctgctcattaatgagatccatcccgatgtcttcggcatgccatgtttgcgtgaagtcagcgccatcatggtcaattaatgtacaaagtttgacttgatgatatttgtttgtataggcaatatatcctcccacagcaagctttttggcatctggatgagtgttatcaacggtgaattcatagcttgtgattgcagtattgttagacaaaacaatatcttcggtatcgtcgtaaattggcaaactatttcttgcgtcagttgaaggcgcgcataggacatgctgatcacgcgataaaataaaccattgcatctgtatcacaaccacccttcacgaagctctgtcgacactgctggcaaatttgcccacgggcttactactattcctaatgttgactgtcctggcggcgcaagcaatggctgtgaaccaatgtcgacacgatcccagtcggtgtactgattgattttcaataaattggttgatgagtctagcgtgacaatatctcccgctttaaagtagttaggcaagtctttgtacaagtcgacatagtccttctcaaagttccactcaatcaacccaaagtagtgtggaagtggcaaatctgcccattgtaagaagctaaacgaaacatacattaccttcgtgtctgcgaattcttcgcaagtatacgtttgtgcggttccgcctgcttcaccaccccaagcaaaaatgaattgactacccgtttttctgatatagcagtggcctgtgaaccctggtgaattgacaaagtcttcttcgcgtactttcttttcgtttagatcaaaacgaacattgaaatcagaagtagtctgtgacatgtcggaatagagaatccttgccatggcctttttgtctttgtcgtatatcgtcatgcaaatttgaccaacctggcgcatatcgcttggagaatctaatgacagagctcctaatcctgcgtgcattcgcagaatgcaatttactgctcccacttcaccgtttgaatcagcgggcagtttatagattaacgaaggcccatgaggcccgtgattatttggaccaaaatcagatggcgtagtgatacccaaataggttgtcgagtctggattaattgtgacggtccctgtttgtgtcatcacgccctgatcagcaggtatcacggcaaaagaagggtcgttcagtatatatttgtcaattgttggtcgtgtcttaacaagcatttgagaatcatcgtaggttttcccgtttacttccttcgtattgcctacttgataatatctgccgttaagcgtcaacccaagaaaaccgtcatctgaagaaaaccggctcgttactttaacagggaccggtactgtcccgctatttgtaactgtgatggtgtcggaatagtattcaggatcagctgggttaggcgaccatggtgaagcagtggtgcctatttctagctttggccgtgcgatgtaaatgctacctttgtttccttttgcagctccaacataaacacgtctcattgttgtatacgttagcttagcagtgaatgtttgccagcttgttgttaacgtaaaatcagatacactcaccgagccaaaaagttcgcaatgtgctttgtcgccagcagtatctgcctttgccaaaaaactaaatgtatagactgttgagtttgaattatcagtgaatgattgagcagctagaacagcgctagaagcatttggagcaaatgccattgtatccacaaaccaacttacaatactagtatatccactccatcccgtgaacgtaccaccagaaccggtgacgagattaactggcacgtccttgtatggcatgttgtcagccgtcttcgtggctaccgagtgcgcaatgccatcggggacaaatagcgtgaacgaagaagtgatcgcattccggcctttaggaacatcgtcaatatcagaaaaagtagcaatccaatattttgatgggtcatcgttgaaagaaacctgatgactatcgccatgaaggatgctgttgagcttatagaatgcttgccggaacgaaagattgtccgatgctgccagcctgtagccgacaacaatctcacgagaagggttacgagcatactggatgaactcaccatctgacttgccaatcgtttgtttttcgattgactggcttagtagttctcggccactgacttgtagcgtgctataacccggaatcaagtcttcaatgtactggccatctattagcatcgcctctgctgggcgctgattatcatcagaacccttgaagggcgttgtttctctgaaatcatacaaaattaaaatagcccctttcgtcgattgctcattcgtgtcatgcgactgagctctgtttgcattgggtttgcggttgcacgagcaacctctcggccgtcaatgtacagaggaacctcaatcgtttgcttgcgagtgtagttgacatcaagatttgaagacaaggttgcaccttgtacactgtcattaagcgactgcaatgatgtatcaaagggagaagtgttcacttccggcatcgtaacagcagcactgtcagcaatagcttgtgccatgctcgaaacgttcttttggacatttgagaacttgtcagtaagccctgcatttaagccgttcatgatggcgttaccagcaggtatgagcagcttggcatcgtaactgattgggcctttatgcttgcgaatccaagaagcaattccgccaacaaaatccgtgatcttcccccaaactgctttgaggccattgaagaagctatccatgatggcgcggccagcgtcagcaaggctaaaattacgaagtgcattgaatgctcctttgatgccattaactattccacttaccatgccagtaaaaccagaccatacagccttagcaccattaaaaatactagtagcagctccaatcacaatagactttatattgttccaagctgatgaaaaaaatgatgtaatgctgttccacaatccggaaaagaatccgggaagtgcgttccaaattccctcggctgtgctgactgttccgctccatagtccggataagaatgaaacaatactgttccatacgccttcggtggtagacacaataccgctccacaatccgctgaaaaatgacgaaagcgcgctccaaatagcggaagcggcagatactgcaccattccaaagcccctctaaagctgaaactaaagtattccaaacagtgattgcataagtttgaataaggctccaaataccggagaaatacgtaacaaggccattccagatctgaccagcggcggaaacaatgctattccagatcagctggagatcagcgcctagctgtgtccaatttgcagtaagcaaatcaatgacaataagaatgggacccataataactgctttaagcatgttccaaataccggtagcaacttggacaatcccattccaaattgtcgtcagggaaccgccaaaggttgaccatacagcagtggctaccgcaactattccattccacagagtcgtgaagaatgtggatagcgcgttccaaactgccgttgctgcagtaacagcaccttgccagatagctgagagagtggttgtgaatgctgtccaagcagctgatgccgttgtcgtaatcccagtccatagattgctgaagaaacctgtaatgccgctccaagctgtctgaatgccgctaattgcagatgtaaacgcacccgatatagcattccaaacagtttgtgcaactcctacaagtccttgccaagctccttgtaaccacgaaacaaatcccgaccatagtttttggccagtcttggtttgggtgaaaaagtacaccagaccagcaaccactgctgcaatcccagcaatcaaaagtacccacggattcatgcctaagatcaatccaaacgctttccatacaccaccagccgtttttacgatagtcccgaagttagtgataacggatataacgcctctaatagggccgatcattttagaaaaaacgccgagaacgcttgaaaatccgccgatggctaatccaattactttgaaggccccgacagctccaaggattgccgcagcaaatgacttaacaatgtcgttagcaaacgctgctttaacaatagctgcaattggcttcaaaacagctaccactccgcttagagcgcccttaacaccgtcaaaaattgctttccacggtaaattagcaataaagttcccaacggtagtcatcgcttccattgctgctactccgaaatctgtaatagcttgtttgattccgttaaatattcccgacattttcccattaccgaatgccgaattaaaagcatctccgaccttttgagcaatactaattagattgacaaatgcaacattgactaagctaccaactaggctccaaatggtttgcaaaacggatcctactcctttgaaaacggaagtgagtccgctcatcgagtcgcccttccccaagctgcttagttgtgtcttgatgttcaaaatcaatgccgaaaacggagaaaagaacttaccgattgatgctataacagaatcaaaattaatagcgccaaccttatcgatgattccactaatagctccgacagcgactttagacattgcttgccatgcaggctggagcttgtttgccagtgtttcctgaaggccgtccattgcctccccgactgtcttgtaactcgtggccatcttctggaaagccttgctgttgcctgccttttcgataccatcgaagaactgctgcgtgcttactttgccgttttgaacattctgaactagttctttggtgctcatgcccattgctttagcaacggctgccatgcctgctggagtctgttcaagcattagacggaaatcagcccactgcaccattggcttagcggccatttgtgtgccttgttccatcaaggtcttcattgcctgcttaggatcgtctgtggccgcagcaagtccgcccatgcctttgaccaaacttccgacacctttcacaccaaccgatgcaaattgagcatatgcagaagccatgtcagaagaactgtagatggtcttttgtgcgtaactctgcaaggacttttcaatcgttgagatttctgcgggcgttttcccgaggaacttcatgttgctctcgaacgtttgccacgccttgctggaagcatcaagttcaccagccatgcttttgacgcctacgccaattgcacccacaaccttgactagaccaatcgcaccagcaatcttgctcacggttgatacaaaattccccgctggctttgtcgacttttcaaagctatcgccgatctttgacgcagaactcgcaacattcttaaaagtccccgaaaagttgcggtcaacggcggataaaattgcttcaacactaaaactgtcagccatgtgctccctcctttctttcagataacggaatgattttgccttcgcgcttcaaacgctgaaattcggccatccgttttgcaaatacttgagctctagtatatttgagctcggttgtgctcatctgtgacacttcataattgggctcataatttgatcgcacgttatcaatagctgctttcttatcaaagaaatcatcaaaggtctgatactttggcttaggattcttgctcccggttgttgcctgcacttgctggttcagccatgcttgctgtgcaatttcgttctgtctgtcgacttgcttaagctgataggcttccatgcgcagttcgtattcaacaagcgtcatgcgttcaattttccaaatatcagaaaagcctagataggcaaatgcgtttaacaagatttcgtgatacgtttcttcactactcttttgcacgctttcgtcctcatctaggccttcatgttttttgctactgcttttactgcgttagcactgttcatttcatttgcaacttgcttaaataaagagtctaagtccgtgttgctgtcaataaagtcatcgacttcgttagctgacgggcgtttcttagatgcaacggtggctgaataaatggtgtctgctaaaacagcagcatcgtatgcattcagaccagctagtgcctttgcaacacccatgccaaagttaataccatgcatgacggcacccatattcttatccatttcgcgaacaaagcggacaccaaagttgagttcgtattctttaccgttaatggttaattgcatgatttaaaatcctttcttttaaagccgcccgggtttcacccgtactgtgactttcttgggcgacttgcatcaattaattaagcgtgcgaagtggtggtagtggtcgttgtttcgcctgaaacgttcgtacctgggtctttatcagaatcccacttgacaccaccgccggtactatcaatgctagtgacctggccgactccaaggaatacgtaatcgacctgttcctgagtttcgctgtctagcgttgtccagccacgctttggtgtgccattaactgagaatgtgacatcgcgagtagagtgatcatcagggtcattgtcgctgctgtcttcttgaacggtaacttgcatgtaccatgcgtaatacttgccatcggagttcttacgcttgcggtagagaatccaaaagtctagtaattcgccgttaaacagtgaatcgtacattacgtctgcaattgcagccgtgttgttcaggaactcgacttcgagatcggtacttgcggaactacgagttgctacattgccgtccttggtaacagtggaatcactgtcaacagacggatcaaaggacagcgaagtctgccaagggataatttggccgctaaccgttgcttgatcgctatgtttgcgagccaaggcaacaacgtccatgccttctagcacttttaattcatttgccatgttatggcctcctataaaatattgagattgagtatcagcgtggatcggttgagaaccgtgtcagggacactctggtcttgtgtaaactcttttgactggtcttctacccgtccatagaatcggtaatcatcagttagcacttgtccaatcgcggcacgaaaaaagcgctctgccatatcagatacggtgaaacgctgttttttgtcgccccagatgtcgatggtgattagcacattgccattgagtgacgtctttgttgcggtaggaacaacttgaatatcgccaacaattacgaagggatacggggcgttctcctgctgcattggtaaatggtcataggtcttatacccggacgattgcgagaaagcatagaagtagtcgtatagttcttgctctggtgatgtgatttgaatcacctactttgctgcttgtttaagctgattaataaactgcactttctgataaaggaacgcaggcttcaatacaggacgtgcccgcatgaatcgagttccattttcggtgtatgggttgtattccattgacatgccaactatgcccgttaggccgccatcttcaagcgataacatgatgccatgctttgtagcaccagtaggatgagcatacacggtgccggtcatttgcttagaacgagcttgaagctgtgctgtctgctgcttgacgatttgcttgacaacgtccatcttcgctcgattcagcagaccagcaaccaacttgtccatgccttttatctgcatattgtagctaatgccggctttgctcatttcgtctcaccaacaatcaaagtagcgttttgaagtggatcccgagaggtattgagagcgtaatgtgttgcattatcatcaatcattaaatagctccaattgacggtgattggctcagctaaacggattacttttgctttttgagcatagttgccgaatagctgaacgctcttgtctgttcccatgtcagtgacactggcaactgcagttgccacctttttaacatcaccgtatcgatgtgtttgcggatcatattcttcatcatcaagccagaatgtaacctcatgatctaaccgcatatgatcacctctctcgataggcgggaatgaagacaacggcaccgagagacttggcattcttcccgttggcttctttccagttattgatgtcgtcagcaaaatcatcgaagtcattagatttgaacgtgaacgactggccttcttgcgcataagacgtcatgccttcgttcttacgtcgattatatcgtcgcacgcagacttccaaggcaatgtaggccaaatcactaggaaaggcctcgtccgtccgcaagccgagcttaaatcgtaaggcttgcgtcgtatttttgataatgaggttaagcacatcatcctgtgtgtcagttttgatttccatcatcgtcttcaaatcttcaagttttattggatcgctttctgccatcatttcaccgcctttactgcttgcacgtatttgtatgagcacttcgacttatcaacgaagctaaggtcatcatcaaatggcgttcgatttacatactgccctttgaagaacagacgtttgtcatcaactgtggcaccagcattgtgcatgatcttggtttcattccatcgtttcacggggtcagtagcccaacaaaaatcgagctcatcactgatgacgggcccgatgttgaagtacatcatattccataactgcgaccacatttctgctgtccatttctggatattgctgtcgaccgtttgtaggtattgccacagtcgattgctgtcgacatacacctttcgccagtactctgctgacgggtgactgatgagccattgggcaccaccagaattgtggttgattgtctcaagcgaggctaccgtaacgccgacaatatcagccatgcgtttcagaatctcttctccgtgttcgcactgcttgatatagtcaacgctgatatagctaagcgtgttgctacacagccagcgatctggctttgatttcagcttgcgaaagtctggccgtttacggaagatcacatcgctatcgaagtagaaatagtcctctttttcgcgttcggggtcctcagctagatactgccaccacagccaaggcttcacagacggaatatattgaccgtctgagcgcttgtcggtatacgtgtgtacttctactccatatttgctggcaagcgtttctggtaccttataatcattcacagtgaagagcaaaacgacatctttcatgccaaacccgacactttgcagattagttaggcagacttctaattcccattcgaatctctgaatagcgggttgacacaagatgagtttcattctgtcctccaatcagccgcccggtttcccgtactgtcctatttcgataggcgacttgcatcaattaattaagcgtgcgaagtggtggtagtagttgttttgcctggaacgagcactttggcttgcaagacattctcggcttctggaaagctcggaagcgcggtggctgccgccttttcccacgttgcaattggatcttgcgtagtctcgtaaacggtggtaaacacattgccaacagtgccctgttgaacacccggagttgaaatcagtcgggactcttcaggggtaggaccataaacggtttgcccgagctggtcatcaccaaaggctaccaaagtgtcttccgggaagtaccgttcaacggtatagatacctttggctccctgcttacggtacttggcatcatacgtgacaatagttggcaagccgaacgactgcataaccgcattgagactgccaacactaggcaacaggcctgctgtcttgaagtagtcagcaaatgctttactccggatcaaggcagtctgtaccttggaagaagtcaagattcgcgttggcacgtagtcgagcagtgcaaaccagtcttgcaagtccttaatcggatcagcaccatttgcatcccaagaagtagttgcagtaacttggtgttcacttggaatatggtaatcaacatcgaagttgagattgttctcattaatggtgatcttcccagttgccaaagcctccatgcgcattttttcaacgcgtgcataaacgccttgaaccaaaacatccaagtcgttgtacacaaggctggtcaggtagctctgttcagccggtgtgcgcggattgcgtaatgcgatcaggtccttttccttaagctgcatcttgcgtttgatgtagccgagttcagcggcctgaatgctcgcttcacgactgccaatctccgcttccgtatcgaatgcagaaatagatgccacgataggcgtcttagacccaccacgaagaaattcaaaatccaactgattaattttggttgatgggaacaaggtgtccccaagcaattgcgggtactggcggttttgaacgtaatcaagtaccgtcttttgattaaacaaatctaaaattgctggcataagttaatcctccttagtcagaaacgtggctgaatttaatttctttcagcgcagtgatagcattactggacggcttgactggcaagcgagcagcgttcacatatccttcaacgatgacgcctaccggttgagaaccctcactgacatcaacatcattaatggtcacaccgattgccgttgcatcgttctttggatagatagaacctgctggcaatacaccttttacgacaccatcggttgaactgtcggcttggtgagtgaatgaaacgaatttctcgctatccaagaagttgacctcagatgcggttacctttttacctgcgtacataaaagtacctccttatttttgtttccatggatcgttaacaacttggccctgctgattccgttgtttagcaagtgccgcgcccggagtctccacctttgaaccatgcgttttgggtgtgcttcccttaagcaactcttgacgaacaccttcagccactgcctgatcatgcgcaatgagccactttacattcgcctcagtagattctgcctctggcgttacaacgtgctgcaaatcgtcctcggtgactgtcaatttggcgtcctcaaacatcgatcgagcctgtttgcccatctcgtaggtggcaagctgtgacttgagttcgtctcgctctttttgagccttttctagctcatagtctttcttctggtcggcattcatcttggccagctttgcagcttcgtcaacggcagcttgcttttccttctcggcacgagcaaggcgttttttaacaatgtcgttgacctgttcatcggtgtaggtatgctgatcagaactctcatcagaactgtcttggtcattttccgagtcttgagcgttggtgtcattgtcactttgagattcgttgttttgctggttctcttgactaccgtcagcaccagtatcttcagcaaaaaattgcaaattcatcggcattaaaatcttaggaatcatgttcagaactccttccacagctttttagacggatcaggcttgcgtcttaatttaccggagcttttagagtcaatcacgcttggacttgatggtataaaaatagccgctagctgcggcttataaaaatcctttacggcgttgttcacgtctggattgtttatcaatctcgtgtttgactgatgctgccttttcagcaagcctctcaccgaaaaatgaatatcctttgtcgatgtcgtctataccatgcacattagcagcaagtttaatgacaactttggtatgatcgccgacctttgaatcgatgttcatattaatgacaccttcaatacgtttaccgttaagatatgggccgtcatctttcagttcaataacgcttaggtgaggacctgacacgttaccagatgtcgatttagtgtcgccggctaatgacagcgccatttcatcggcaagtgtcgcattgtcgattatcatcagtttgccgttggcatataaattgccattctgaatggtcacattgtcatcgcatcgattgtatgcggtcaggataagcgctcctagctcatagtctttaatgctattagcctctgctgccaaattaagcaggcgctttttaatgctttcacgcgttttcaaaccttctgatttcatgacagtacctccctgaccaactctgggttctgcttggccaacatgcgaagcgcatgtgctaatccgtcaaccattgcctcgtcatcgttttgctggtcgaaccctcgctcttgcaggattgcgtggataatctcatgtactaaagtgattttggcctcgtcctcagccataccttcacatatacggatacaagcttgcttataacgcgtttctccccagtaatcgccttttaagtcttcgctacttagctgaagctctttgtgactgacctcctcaaccttgtactcgatatcatcaatcaacactttttccggtagcttcattgtttcctcctaatcatcgtctgattcatcatctggcgcatatgccgcaatggaacatcggcaattggggtgaactggaatatctggcacatcgtctacacgataaatgcctctaccagttctgccaccttctgaaatctccttgcacacatcacacgcgcttggctcagccacccatttgcaatagtcatagccgaacttattgaagctatctaattgcgcctgtgtttgaatccgagctgactcagtacgtgcaattcgttctgtcacatagcggtgattgttcaccgtttctgccacttgaccgcgtaacttgcgagcaatctttagtgggctctgtccttgaatggtggcggcagtcaatagctcatccagttcagctttaagaatgtcttggttgatccaaatgcgctgtgagaaggtgtaatctccctctcgtttggagagcaatttggctaaatcagtgtagccgtcctcagataccgtctctccgagtattccagcttgccgtttgatctcggattgataatccttactcagcttggaaacaagatcggcgttcactttcatgtgtgcatcaagcatttcttgaccaatctcactcttgagcatttctaagcgattaatgcgcatggtagcgttgtatagcttgagacgatcattgacatccttgctaaagtcggaatatttgagcggttcaccgttgtacatctttctagcatcatcgacaatcgactttgcttccgcttgataagctttaatatcggtggccattactgcttgacgcgcaccggccatactgtcgttgctatatgcggcatacttggcaagctctgaatcaatatccttttgaatgttggttaaagctttgtcaaaatattcctgaattcgggcattgaacgcctcgtcattcttaaggttctcgacaatccatttccgttcagcggccgttcgcttattccagtaggcagaattactcgctatctgttgctgagtcgttgttgtcatcattgctccctccatcagtcgaaggcttgccgtctggggtcagttcaaatcctttgcccgcatctcccagaatctcggcagctttctcctcatcaaagggaaacgcggaagtaagcatttgaatagctgattctcttggcaaagcatgtgaggcaacctgctgcacgattgaaatcatagacgtgatctgagatccattaaggcttacttgctgaacagtcttagcatctgtaccgctggcatcgtcaccattcatgaatttctggaagtctggacttgatgggctgttagtagcagcgtcctttgctttctgggcagtctcgtcagcaatacgtttaatttcagccttaggatcatcgacaaacgataaggtactcagcatggtttgatctgatacaagccctttgagtttagaagccgcgtccgcttcgtcggtaatgttctccggaagatttcgcgtgaatgcgaagttaagcttttgccagtcatcagatttactttctggaaggattgtcccaacactgaatgcaatcttgtaaagggaccggagtgactgtgtgaacttacgatcttgattggccgctaggttcctcattggtagcaatttgtattgcaatgcaacaccagagctattgccgctgaatgcttcatcgttcaagtttgcaaccatgctaatctgatagatcatgctgatgagacggtcaatgaggtgttcttgaatggcatcgccatcaggtttggtcagaaattcagctacgccttgagcagaatcagcgtctggagcatagatgatttggttgccattaagatcgagtttggggttgccgtcatcgtcctcatcgagtttcaggcctttgagaaccaagtacgcattgtcaaaatactcattctggttcgccttctggcttagcaccttgtctaaagcattgatgagcgtctcaacgttctcaaagatgccttgtcgctcggtgttcatgaagaactcaactgctggcacttcactaaatggattaaagccgtcttttccttcaaggcgtgtcatatcaaggctgtatatgccgtctttcagatatacctttccggtcaacgtcttgtcttcatcatgccaatacatgacaaacgcaatggctttgtgcgctaccgtgtcgtcatagacaatgaatgaattgataggcgagctgtacgcaatacacgtcttgctgtcttcgtcttggtacaaaaaagcaagcgcccgtccgtaaatggctgcttgcttgctgatctcgcttaatttgtcttgaacgctgtttgtgtcattccactcttgcagcaaagtattgtcctgtgtgttgtcgagcgtgatctttggtggaatgccaatgtaaaacccattgtaggtatccacgatatagtgagccaagttgccaacaagacgattgtctggcccatgatcctttttcgcatcatcaataatctggtgctgaccgaggtacattttctttgctggaaggtacttgtttttagctagatcatcattggcagtaataaacgcattgatgtcatcgccagttagctcttcatcagtcgggaaaataaacacatctccgtctgtgattgagcctttcccttgaactgttaatatgatggccacctccttagaagtatttgcttgtgttcttgaacgtatgagctgcatttctccgtttgattacctgcatgacaaaatatctcatagcgtccattgcgtggtcatgtgccttaaccactttgtcttcacccttttgactggccttgtcatcccacacataagatgcgaactctttgaacagattagttagcccaggtgtgaacttgatctcgccagagttcatagctgtttgtgtttctctaatgccgtttagcacatcgttatcagctttaataacccgatactggcgttctctcagtttggcaataaacgaagccgctgatggatcaacaatcacttcacagcgtatgtcaccgacaaattggctgaaatcccgagcgtattcatcatctgtcttctgtctgctgctatgccgtccatcgtagtaatactctttgaggcaataccaaacagagccacatttcccccaaagcaagaaagctgtggggttctgtgtgccatagtcaacactgacatagtatcggcttggctgctggcttggattgctgaccatctcgtctttattgaagttgtcgtagacaattccatcagccagaacccattgccccagaatgtatcgctggtaaaacactcctgagtacatatgttcgtacctgtcaataacttcatcgctcaggcttggattgtccgtcatcacaaagtggagacgcaatgcgcgtttatcgtctgcttgatcaatccagtcagtcttgaaccagtgatacggaccctctgggttcatattgaaccagtatttgccgccagtaacggaaacacgcgctgtcgcttgattgacaaacgactgtggcatgagagctgcttcatcaaagaacattccggcaagtgtgatcccttgaatcagatcttggctgctttcatctttaccaccgaataagtagtataggttggttcttccatcaatgctgatttcaagcatattttctgaacgccgatccacaaccgagaatcccacttgttgcaatgtttgtttgagtggcctgataacatttcggcgtaatgatccaatggtttttccggcaatgccaaattgctcgtggtcaaacataatcatgctccacagaacatagctgatcgacatcgcaaacgtctttccggaacgcacagcaccatcagcaatgattgtctgcttgtctggatagcggcgccaccagttgatgatgtctaactgtttccctttgaattgatcaatcggagttgtcattgacatcaccaccctttgggatactctcatcaattgctgccaaaagcttgttcagtcctccatcttgtccttctggtgtgcgataggcgttggccttggcttccatgatgtcagcctcagctttggacttgcgaacatcagccttagttttctcaatatcagtaataatcttcgttagctgagcattgagcaactcatcattgccagggtaacgctttaacaattcgcgtcctgctgccatgcggtctttgatgcttggctcgttttcaacagcatctgcaccgtctggagtgctaactataattgtctcttttgcctctccacggagaacggtagtgaagtattgaagcacctcagcagccttggcaatcttgtcagattctaggcgtttcatgcgttcgtcgatggcagctttaatgttaggttttgttaggttttctgcaccggcaaacctagccgttcttttgctgtatcctgcttctagtgccgctttggtggcattgctatcagcaatataagaatcaacgaacttcttctgttttgctgtcagtcgcattacatatcaccacaccttccttccattaaaaaagcggtagctagttagctatcgctggttataattcattaagctgttgttactcctggattgtctttactaggctgtttcttcttatcagccttggccttgtcccgctgttttttcaacttgtccttgaggttcttatagacgtcttttggtgacggcaagtggaatgccacagtatccaccccctttttgacaagcataccttactttcaggatgtgcgtatccgcctcgcgtcttaacttgattagagcgtgaacggacaatttctctgtcaatcttgccgatggtccacgcttcaactttcggcatgtaaacgccgtattttgttgtaatcatttgagccatgaaatcacctcacacatagtaaatggcacgggtatcatgatcgctgtattcgaccagctcaaacgttttgtgagcaaccacgccaatatcatcagtccactgatcggttggcttgcgtgtcgatacttgacgctgaacgaatccgcccaggtctttgctcatttctgaatgtagatgccccgtaaatagctcgcggttctgtgctgtgcctaacatgaagccaaactcgtctaggtattttgcaaggtaattgttcttgcccttgtcaccatgagtggcaccaatgaagttgtgaccgagcatagcgcctttgtaatgcttcagtgatatgtcccaagtgatgttcggctggttgctgtaggcacgtttcaatagacgtgcgaacatatatccaactgacggatcatgatttccggcacaatacatgacctcacactcattggcgttcttaatgattgcttcaatcagtgtctcgaagtattgctccatttcgttcacagtctcgcctaggtcagttgtttcgagctgtgtgccctttgctgtggttgagttgatattatccacatgagccagatcaccgcccagaatgagcaatatctttgcgtagtggccgcgttcaatgatttctagttgccgtttaagagattcagcatagacgtcgaatgtgtgaccgttgaaatgtgtatcaaaagcaggaatgaccagatagcgatctgattccacaaaaataggagccttagcttggtatggctccttgtgtgttatgatgtcactcatcaatgattcatattgttccgcctcaactagcggtctgatttgtatcttgctctggaagagcgttgcttcaggtttctgcttccagtagttgcttgtggcacgtacaagctcccacttagtgtaatcatacccgtgagcttccaaaacctctctaggcgtcattttgtgacccctgacaacctttagaatggtttcactggactgtgtgccgtctgaatcgtattcattcttgactggtttttggaactcgatgccaagccgtcttgcttttccctgcaacgcatcatagctaatcccgagcttgtcggctgtctcgcgtctggtaaagccttcagaggcgagcttcctaatgccactgatttgttcatctgtccattgcatctactcgcctcctgaaatataatagttgtgagccacatgcaatcatgtgctgctcttttcatttttattcctcaggctctcgggggtcgagtccgagagcttttttgttgcttaaaaaatttcgatgagttaaaattaaattgttcacaacagatactcattttcattcctcggtactaccccactccttagctctcggcccccaaccgagagcttttttatgtgcctattataagtattgtgttacaatgacttagtgagttcattctcacacttcaaaagtgattggccctcgttttcccagagcgagggcttttttttgcacaaaaatagcacctcaccgtttggcggagtgctagaaacgcaagtgacatcacgatactaattcgctaagcaaaaaattgccggtttctgttaattcttccatcataatttttttattgtggtcatgtcctggagtcgcatcattaccgtaaattagttttgctagtccattaaactccatatcaactatcgctgcttgaattgaggaaattgaaatgcccgaaaacacattgaccttagcaaattctgaagctacttcagcgacactaactccttgaactattccagacaccgccgcaaagcttctgttgcttggaataacgggccaaaattgcctgttcttaataagaatcaatgcctgaggagagcactttgaaattatgttaagaacagttttggaccgggaaaaagttttccttatatcttcgctgtctgttacttttgccaaatatgcagaaagaatttgaagcaaatcttcatctgctgaggagctatctagaatagatgatatctttgaatagattgcaaccccatacggactagtcaccaagtcagaaagcttttctaacgcaagctgttgatcatcagacttctgcaaatattccgcaaaaagtttgactttttttgcatcatttagtttttctttgagcttatttcctgtatcaacaatatcaagcactaggcttccccacttaccgtcaaaaaaatcagtagtaaggtttttgcctttttccttagctgtttttgccacagcctctttcacctcttcggttcccaagcgttgggcttctatcctgtctgaaagagattttctctcggccagaaacgttttttcaggatttgctattaattcttttaattcttcaccatttatcatcctatatcacctcaaaaaaatagtaccccggcgtgaactggaatactacattgaggtgatatctgtgcttcatatgtctgctgctcgctctccaagtgtcagatggggtcatcgcaagctgtgtccggtcgctaaactggacaatgtggcatgcgggaatcgaacccgcctgactatctcagccagtcctcattgccacgccttgccacagctttatcatcaccatggctcggaggaaaaacgcggtgtctcaggtttctcatctttggcacaataccatcatatgacgaaaatcccggcaaatagtccgcaaagtgtccgcaattagtccgcaaagtgtccactctgcttttttaccaaggaaactaatggacacaactcagcaaatgcatacagtgcccgatttctcgcgatataaaatgctgatcgttccatttttaatttagccacaatggcgtcattagttagacgcttgctcggtgagataatgtatgtttcccacaagatggtacgatagtcttcatcttcaatgatattgatcgcattttcgcaagcgttcaagtagtacagctcgtcagcgtgcgacacgagcttatcttcggctttgttgccatagctaggtgacttaggcatgccgtccatcacggggcttctgagcgctattttggtgcgttgagcgagccgcttatgatgccagtagttccccaagacctctttggcgttttcaattgttttgtcatgatcaattgggctaaaatatctcgttgctcgcaccactgcgtccactccttatggtataattaaatttgtaaaagtttgggggataagcgtgccgtagtggtgcgcttttgttatactgtcttcggaggcccactccttttaaatgattccatttgctatcaatcacgtgtacgtttggcctccggcgcgtccctcatcagacgcgctttttatttgcatttagtcaggattattcctgctaatatttaagttcgtttggatcgtcaatgttgattggcaaggttaatacaatcccgccagaaacttctgcagcagcttcagcatcatgccttagcacaaacagtttagatgaatcaatttcgcttgatgtattaaattccttgctatatttgctgaagtaagatacatattgctttttgccaattctgacgatgaagaccgtgctgccaatttgaaccgtcttgctgcgcctattgctaacaaaatgatcaaaaagcagccaaaagaagtatgcacatatgactacagtaataaccgcgcaaataagtagctttattaataacgaattcatttcattttcctcttttccagttagcccacatccacattgcagcacctgagattagcagcatgacggcaatcattgctttgctttcagcctgcgtccgcacatcggacaataattaatcatgattggatcaagaaagttgccaagttctgattcaatgagcttatgtggttcatggcagtatgggcagtccgtgtcgccgtcactggctgcagcgtaacgggcgcttaggtcatcgtaggccatctcccaactactaccctgctcgccgaactcttccaatgctctcaatgcgtccacaaatacgtcctgtttagtttccttagtcatggtcggtcacctccaatagctccgtattttcaaagatgttgccaatgacctcgcaatctttggttagcctttgccaaataccatttcctccattgtcaagcacatatccagcagcatatgtttcataactaaccggtgctattaccggcttaccgtcttgatttcgaagaccaatatctaagacatcgccctcgtagacttctcgtccgttcttgtcgtggagaccggtatactgcatgatttcaaatcggttaggaaacatagactcatcaattagctctgtcatagtacgtattgttaggcggccacgtgggctaagcattatctcttctattattcctcgataaccctcaaacgtaggctcataccaacggtttttaaggctatcccacgctctgaacttaatctctcgtttcatttctccgcctccaatttcacgatttcgccggtttcctcaacgcgccagacgcctagtacccatgcagtagcgaaggtgttttgattagcaagtatccatgccaatgcctcgctaaccttgtgtccgtttttggccgtgtccaacacgccaagcaaattagtttgcccgtgtgctgaccgcaatatctctcccaccgctttcggaatcaccggtagatcatctggcaaggcggcatcatattcatcaagataatttggctcatcgtcacagtagtatgggcttccggtttcgttggtatatgcgtcagaaacctcggcgtagcattctgctaatttctccaacacgtcccgcttcgtctcattgctcatcgtcagtcacctctttattcgcggcactccctgcaattcgttcaatgtcggcttctgttacaccaacgccaaagcatcttactgtttgataattaccttgatctttgatcactggccgcttgaaataggctaacatttcatcactagagacaaacgctaatgccgctgggtttaacaaatacccgctgtctagcttaatcagcatcgtcagtcacctcttctttctcgcagtcttgcaagccgtaatgttcgatctctgcttcggtaaaaagaaataattctttgctcatattgggatcaatgtctttcgctggaaatggtctccaattgttgtgaggccctagcttagatgcgctagaatatttctgaaaatgccagccttccgcatgtggcaccttgacgttgtatttcttctcctttttaacggtgtatccgttgacgtaagcgttaataagcaggctttcctcgccattatattcatcagtacgggcagaaatataggttgctgggatgtcacttacacgcgctttttcaacgatttcggcttgctctttggttagcactaccttttcaggctcctcaatcaaagtgacaacgtggccaccatgctctttaaccgtatttttggcattatcttcactaaccgtaatggggcaagatacactgtttaattgccagaagccatctaactcgccaaagtcccaatagtacccatcatcgttctttaccgcgtacagttttttttcgctcatttttcgtcctctctcccgtaaatattcttaacaagtgccacagctttcagattggcatattcgtttacgttaccgtccacataatcgcccatagaaagcagcttttctgcacgttttagtgcttcttcgtaattcatctttttttgctttggttctacgggcaccagcttgtagtccacaccttcatacatgacgcctacaacctcgcctgttgctttgctgatgtagatgtcatcgaacgtgtcgtctcctgttttcatcggtcggcctcctttcccgctgctaattcctgaatgacttcgttgtatcttgcgggtatctctgttgattcaatgtgattttgttcaggctctagccactgccgaatatcaaattcttgttcaacgtctttgctatgcggcatcacattcactgtgctgaaatgcaaatagtcgtcttcatcgttttgaatgaaatatacttgtctagcagcacgtgtcagactgtcaccatgaacaattgttgcgttcatgccgcgaatggcacaattgaatatcaaaaacggcaacgtactatcgccaagctcttcaaggtgataaaaaaacatgcttggcagataatcccacggcttgtgcttcaaacggtcttgttgccatcgttgaatcatcattgagccagtcccagcagcaacctcgtaatactcgctactgtcattcgatccaacgagcatgttcacgagcttgctgatgctttcaggggtgaaatcttgtttcttgtctttacgatcagcttgaacactcatgaaatattgcgagaaccagtcatgtgatacgtctgtactgacatctaggaattgcttaaaaatcttgttacgcttttgctgatccatgacaatcttcatcagtgctgctggggcttgttgagcttcacggacacccaacagtttgtgaacgacatctgctgtgaatttggtcatcatttaagtgcctctcatttcgcgctgactgacttcacagcctgatcggaatagtccttgatgctctgtacgtctttgatggcctgtgataagtcattgtttgcctgtttggcggcttctaactgtgatgtaaggtcattgatggtctgctgtttagcatcgacctcggcttgtttctgggcgactgcatgctggccttcaacgatcttttgctgaatctgggcatctttgcttgccatgccgttgtcgtattgctgtttgagggctgcatactgtgcctgcgcgtcagacaactgatgttgcaaatcggacaagctagattgtgaagcgttgatcttagccgtcagcttgtcgatattgtttttggtctccacgatgttctggtgaccttgccaaacattgtcggcaatggcggttgcgccggcccccaacataagtcctgctaaaacagttactgtaaatgtcaattttttattcataattttttctccttagtttttaaagctgttcttccgtgaatagtcctgtgtgatagtcatatctagcaattgtgatcggtattttgtacctgatcatgaacagcaacattttctgcttagaatcacgagtcagtgtggcattcccacctttgacgtccaccactttcgttagcttgccattttcgtaaaagcagaaatctggagtgtatcttcgtgctgaatatcgctttccgtttatcacgaaagccgaaataatctcgaaatgttcctgcatcgttaccttctgtggcttgttgcgtatcagcatgtaataggcgccctctgctttgcttgcaaatcgaatgccatcaattacgactggctgcgcattgtacttgcctctgcgtctcttgcggataaccatgtctaacggctcgcaatctcttcatggccgttgttgcggcgcggtaacttgatctcaaactcacttgccactcgcttcacgaacgttgttgacttcccaatccgtttcgcaacgtcaatcagtgtgtcgcattgtgaggccgtttctgcaattccacgtgcgtatttggcacgggcttcttttcgcttttttgaaatctttttaatgccgttgcttactgaagtcttcaaaatatcgctgtcatcaataccggctaccgcacgtttctcgacaattgctttctttgatacaacgatccggccgttgaactcttgcttctctatttttgagaatgctttgctttttgagatgtctagcattgctgagttttcatagcgcttaagcaattccgctttgaagtcgcgccacactttgtcaccctgtttgtataaacgcactgttacttgtgtcatgcttttgcctcctgttttaaaatggcaaatcatcatcttggatgtctatcggctggccattattagcaaacggatccgtggtattcgctcgtgaagcatttggagtcgtttgactcgcgtttgtggtcgctgttgctgatgcattggccgtttgctgtgatttagggctgttctgagacgcctgtcgtgactcaagcaaagcaaaattatcaacgattacctcggtaacgaatactttctgcccttgcgcgttatcgtacgtacgcgtttgaatacggccttccacaccaaccaaggatccttttttggtgaagtttgcaaagttctcagccgacttgcgccagatcacacaactgataaagtcagtttcacgttcgccgtttgaactgcggaactggcggtcaacagccagtgtgaacgagccgacagccgtgccgctttgtgtgtagcgcaagtcaacatctcttgtcagtcggcctgttagtgagacactgtttagcaatatgcttccctcctaattcttttcgcccaatgctcgtagcttttgcaattgctcagccaatttggctctgtcttctgcggacacttttttgtgttctggtttgtaacccggttcagcccaatcaggtaatttctcgttccgaactggcttgccgtaacgccgatcaggttgattcgttttgcgttcactatcgtttgcatcgacagcagcaaccgtgagaagacgcttgctttcccagtttttcaagatgccgttgacgtacttgtagtttctgacattgctttcaactgcagtccgtagcgcatttagaactagcttctcaggttcaggtgatcctgcttttcgcatgtcatcaacccaatcaacaaggctttctctggtgaacggtgatagttgtccaaacccgttgccttcccagaaattgcaaatatcaagaattgatgatgacgacgatgacggttcttcagcaggcctctctgctgcctttactggagcagtagtctgttgtcgtttagttttgtctagtttagtctcgtcttgtttagtgtatgtgctactgtgttgcctactaggttgtaaactaccttgtaaactgtgttgcctactaggttgcctactgtgttgcctactatttgacacactgccatcagattgactgctaggttgcctactatctgacgtactaagctttcgtgaaatatcgatgactgagtaggtcgttgccttaacaccgttagtttgaaaatctatcagccctgactgttttagcgcgttgcgggctttgatgatgccctgacggcttaaaccagtcaacgtttcaagtgttcgattcggcatattgaattcgcttggccagcctagctggttacattggtaaaccagcccatgccataatgctatctgtcctgtgcttagcggattaacgctttgctgaatgtagaactctcgaattagcttgaataaatccatgcggtgagtcacctcctactcgactagctcatccatgctgataattgtggcgactcgtttagttgccttgcagtagtcacaggcctcacatcgatgtggccgtacctgacctgatttaaccgcctcaacgtgttcggtgctgtcatggatctcttccagtgcctcgtccatacggtactgtggcacttcgatgacggcatggtcgggtacatcttccttggtcacggcaatgatgaatgctcgtggccgcgttccgtaattttggtaaatcagctcctgataaaccgccatctgaagctgatagttataggcatcaatgaaactggttggctgacgttctcctggtttccaatacttcttgtgaagcgactgtgtggtctttagatccaaaaagaatgactttgtggagtcgaagcagtccagcttgcccatccactcgaccccaaacagatcaccggtcaggatctcttctttttcgccctgataaagtcgctgaacattctcatcagcttcaagtgttttaatcatggcatcagattgtttatacggagctttcagttgtccttttgatgatccacgagttgagaacatctctgggtgtcctttgataaaagactcatgagcttgcttggattcaaaatagctgtgtagatagtttccaaccagcaaggcagtcggatcagctcttggggtccatttaccttgcaactcggccatcgcttctgcttcgcatgtcagaaatttcttaaaccaggtagcagactgatatttgaaactggtatccagtgagtaataattatccttgttgaccgtcaaagatttctggttgttttcctgcatttgggtcgtgggtaatgtctggcttaagagcatctggcttcacctccgattttgtgacgggttcagcgggagcgttaagtgcatcctcgatcgagttaggatcttcgggggtaacatccttcagttctggatcagcttcgactggtttttcatcggcactgaccgcgctttgcatgtcggttgtcattggaccccacttagtcagcagcgatttgattaccgtcttcagggccatagcttcgtagttgtctttccaaacgcccttgggctccgcaccaccaccagatttgctgaaacgcttgcgatgatcatcgacttgctgataagtccaatagaccatcttttcaaaaccgttagtcagtttgaacgatgcggcatagccaactggtttttcgcttgcgttgcgatcgtggaagttcggcgtgtactcaagttcctccgttagtgggttccagctcttgaactcatcttcataaattggtaaagcagtcaggcgctgataccgtcctgatcgttgagctaattggatatagcctttataaccaatctgtggctgcgcctggttcttgtatggaacgatgtagacaaaacccaagctcgggttaaccggaagatcgagcgttgctgctaccatggccgagttgataacacttaactgatcaactctggctaagcttggattaaggcttaccgcgctggcaatcgatgaaagaaactgtggtgcccgtttgtccagaagcgctgcaaacttattcttaatcgtttgcgtctcaatcagtttcttaactggcatcttagccagatcgtattgattgttcatttgtactcctcctgttttcttggccattgtttgaatccacgttcttttagaaattcgaggattgaaattggatcttcttttccgaacagtgtgttgacaatcgcttggtcactgaagtaatcagaaggatcgcgcaagactcgatggtagaaccagtcaattccgtgctccgcaacttgatcactcaaataggaaaactcttttccttcattaaatgcgccatcaagtggagaggcataccgtgactggtaaaaccaaggcttcgtacgatcaacattccagtcatcagccattgacaaaaactcctctgcctgctccgtatccattccttttggtaaggcggtaccgtgataggactcccaatcagcgatagccttatcttcaagcgtttctcgtcgttgatactcgttaagaaccgctgtgttgtaatcaagcatggtcatcaaccgccttctgtgataaacttgaggtatagttgaatgtgctcagttctacatttcccgtagttggcgctacgggatttttttgtgcgcatttgttgagcatccgttgactaagttcgaacatccaaagccaaccgctatctccgtggctcttgtaaatcacgttctcggcttgatcatgaatgtcttgccaatatgccttcgtatcacgcatagttcttccttctatcgtgtccattgtttccaacctcctactgctgtggcgccaatcatgataccggcaagagttacaagcagatacttccaaaacgctgatgatgggtcgaacagcactgacatgattgcttctaacatcgttagtcctccgtgtatgtttccatgaacttgtcaactgcctttgagtaccaacggtcacgagacttgtcgctcttcttgcgaccatcattgccagattcgtatcgtggcatacctgattgatatgcaatacgttcaaaggcgtcggtaccaagtgacagcttcagctttgcacttaactcgcccttgttcattccgtggccaggcaaagcatcttcaacagctttgtttaccatcgcctgaaccactggcttaagattgtctgcaagatgaactgcaatgagttctgcaagcttgtcgtcctcattaactttcaccgctacatccacgctttcaccttctctactggtctgatttgggactttagtgatccgattagactttctaggctttcaactagtgattcacctgaatcaatgtatgatctgatcttgctcacgtcggttggtgtgaagtgatcacgtcctttagacatcactgactctgctcgttctctagcctcttcaaatttcttttgggccattttttcgtggagataaacaacgtatggatcgtcagtatcaagatcatcagcgaatactcttaatccagtctgatattcgatcgctgcgttcaaaaatcgatcattgccaattgcaagcgccatgggaatcagcttatcgtctggtatgcctcttgcttcccaattgctgacagcggcttgcgtaacgtgcattttcgcagccaagttcttacgagttaggccctcttcttgaaggcctcttgaaaattcctgaaaaatgttaattgccataaccacacctccttcaaatgtgtaccgccgatgtagtagtttcacggcgatatatgcgatgattaagctgtagcaaggtaatcaatcatttcattccttgcacgttctttctcagcgctgattgccatttcgagcatgtcatcgtccatggtttcccaaaaagctttgggcttatcatcgcggtagctcatcagcgcttcgatcatttgctgtcgatccatgtggctcacctcctcatgccacttcatcgtcagctaattcgacaagccgtacttcatatccatcttcacgccagcggcgaatgatcgtttgtacgtactcgttgaagtaaggccgttcttgtaagcaaagtgtcagcctgtcaacggcgtgcccatctggcaaaactaatacgtattttttcatttgactgcctcctctcgctgggcgggaatgtgaatatctcctgatgtgatagtctcgctaaaaaaaagctcaccaacagatttaccgtaatgttccgcaactttacgcttagttttgtcggagccattccgatcaccagtctccatcattgcaagcatagattgtgcgataccaatagcatttgccgcctgtgcctgtgactctctcttagcttttcgtgcctctaaaagcttgttcattgttttgcctccttatcacttgatgtgataactatatcatcgcttctcgtgatagtcaacaataaaaatcactttttgaaatactttctaaaaatcacttcgagtgattgtataatcgcattaggaggactgctcatgaatattggcgaaagaattgcaatgctacgaaaagagcgaggctggaaccaacaacaactcgcagacaaaattaatgtgagtcagtccactcttgctatgtgggaaactgacaaacggcgtccgaacacagatgctttgaacgacctagcggacatatttaatgtttctttggactttcttatgtatcgtacaaataaacgcagatattatgagctaaccgataaggacaccgaggatatcgctaaacaggctcagcagattattgacggtatgaattcagatgctagtgtcaatttttacggtgaaccgatgacagatgaacaaaagcaatctatgagggacattatagaaatggggcttcgtatcaataaagaaaaagcgaaaaataaattcacacctaagaagtatcgagatacgggcggagattaaatgtcgtatgccagtgacgttgctgatcaaacttttaaatgtacggctgatgtcgcaatagattcgactgatccattttccatatgcaaaacatatgactatggggtcaaacgggtcactatgcccaattcaaccatggggctatcagtcaggactaatcgctgtgcaacgatattcttgagcgacaatcttactaattctcaggaactgcttgttcttctccacgaagttggccattgccgcatgcataaaaacgatagcacgccatttatgcgttctatgatgtttggcggttggataccaagaattgaacgagaggcaaatgaatttgctgttagatacatggtggatattctgaaggctcaagacgttgaacttacaacgacttatgggatacttcaatattttgatcttccagaatcattcaaccgttttgtacttgtttagccgaggcgctcactaataggcgcaaagcataatggagggaaagcaatggggttttttgacaagcttaaagaagccggaaacaaattgaataaagcatcttcactcacaccagaagaaaaggaggaacgcaaacaagccaaaatagccctaaaagcagaagtcattttggaggaacccatcaagtttgtgagcggccacgaacttgttggcgcttctggattcggcagcagaatttaccaattaaaagataataccgttattttcgggcttaacaatccggaccacttttggataacaggcatagaatttgcaggaccaaggtatcatgagattcaaactaccaaaagcaaatcagataccaagggcaaatccaaaaccaaaaagcatcgacatggattgggtggagctgtaatagggacaattcttgccccaggtgtcggcactgttgctggggctatcgttggcagccattctggaaaagacaaaacaaagggaagcagctccactattggcgaagcgtcaacaatcacttctcagattgaggacgactcgtctactattgtcaagcttacaaatgctgccactgatgaaaacgttcaaattattcttttaacaaaaactagagattaccagaggctaatgtctttccatgtaaatatggaagttatcaacaaggacgatagcgatgaccatagtgaatcgtcatctcgtacgtctgcgaatccaaaaaccgatacattgtcctcgagccctgttgaggaaattcgaaaatataagcagttattggatgatggtattatcactgctgaggaattttccacaaaaaagaagcagctattagggttataacctgtaaaatcactttctgtgactcaaaatcagtctaaatcctgacgactataaaagctgtgagttagggggacgtgtcatgggactgtttgaccgctttaagaaactggttgtcggtaattcgagcgaaacgcttcctacacagccggctgtaaacataaagaaacacagccaaccaatgcaacagcacggaattacgactcaagtaattcataacatcccgaccgaagttgctgaattaatgtggtttttcgatggaccgttgaaaaaccttgacgctgaaacagaagagccatccggaatttcttttcgattacctgtcaaaaaggctagtgcgccaacgagaatgggttactggccgtcataccataagatgtcacccactgagcgatatagctatctaaactggctaacaaacgttgatcagcctattgatatcggttatgtctttgttttcttttatggtcttgagcgcatgattgcaacaccgaaacatgatgctgcagtgaagatgattcatcggctaaaggagcaccacaacgaaagcgggtcattctcatcctattcagatgaagcacttgcgtacgccgcgttactttatcacgatcctaccccactacaatatatccgcggaactaacacatcgatgttgatactatcgaaggcaaccttcgatcatcggttaactgctgatgaaatcatgtcaagttcacgcgggttcggatgggacaacactagatacattaaaaatgaacatgaactttttgagcataatcttcttgtttgtctacaaaatttgtacaaacaggactattatccgattccaaatcaactagatcaagtcccacgtactcagttgcatcttgccaatctatcgattgcaactgatgaacgagttatcgatttaggcataattgatggctatcattggacaaccactatgcgtatccccaaacgaatagatatccccgacttttctcaatcgaagattatttctagagatattcagcaattgctcaaaatagcgcacgaaaaaaccaaagaagatctagctaagatgagaaagaacggtgaacgcccaaaggctgccgctaagaaaccttctcgcaaaaaacggataaatcctgatacaggctatcccctttcgactgaaaaagcaattgcgtgtgctcgtgaactatataaatctacaattgccgttcacccacagcagctcactggtaatccagactatgatgaggaaatgagaatagtcgatcacgtcttgccacactaccgccttggtgatctacagtacaagcttggtgagtggaaggaagcagaaacagaatggatttcaattcttgacttaatgggtgctcttgccgcggaaaagctggctattatgtaccacaaacaacatcggtacaaggatgaaatggaaatactatctgctggcatgaaagtttctcagcgtagtaaggtctatccaatacccgacaagtttgccgatcgtttgattgcggctagtgaattctacgtgaaacattctactgaggatgaatcagagacttttcattcggccagcggacacaaaaatagccccggtggcgagggctgataagcaaaacaagtaagcactgtcagtacataagtaagcactgtcagtacaatgtaaggagatgtcttacatgaaaattgaaacaatgtgcgctgaatgccgcaattataaatctagagctgtcgcggaagtaactgatgacgaatcactgaaatttatatgccctaggggccatacatttaaagcagtgttacgcacccctctgtatgttccgatatttgaaaattctttacgagcatatgctgatgaagaatactatgagtgctatctaagcgcagttacgagcttagaaaaattcagaaacacagctatcaaagcttacttttggtcaacaaataaccacaaaccaatagacaaaatcatcgataaatcacaagctattaagtattcagaaagatctattgcttcgtttgcaacgatttccctactactttttggagaatcagcaattccgatgttgaacaaaatgtacgattccacagaaaaacgcaacagagttattcacggaactttggtaccaacaaacgatctttgcgaaaaagtaattaagaatgtttaccaagttatcaagtttttccaaattagctggattgacggcgatgggtactgtcccatctcaaattatcaagattcgattgccacggataactatgaggcaattattagcaacaaaagagatcatgagcacgcagttcttatgggaaaactatacactctgtcaactacacaagtggtacataaggataaagaactagacgtagaattcaatcgaagcttcaaaataatcatgagtatccaccacagattttttgggtgatcatatagataatgaatcgggttggataaccaattgcccactacttttttcaaaatagacattgtcatcaattacagccggacgatcatctgaaataccctgaattctgattgtggaatcactgggtaaagactctaaatatttcacaaaatccttcaccttgacaattccatctttcaaatcatatgaataactataacctagcttgtcttcattcatcatcgtcgctcctctatgtgaatgtctagttatctttcactgattatatcataaagaatttcgtactaatcattcggaacgtcatcaccgccaagatccgggataaactacatccagggtcgtagctttaaaactcagttgaacttgcgttgtgtcgtttaacgtgggatgaagccgtatatcattgaccaggctaatttcggttccgtttgcaaaaacatgtccatcttttatctcaacatgattttccattttgatcaccgctctttctggtggctgatgagatttattcacctaattataccaaagatgaattgcattcaccatcaacggttaaaaacatagctactcgtatcaaattaatagttaagacaggagtcttacttatggcaaattcaacgatcaggcaggccgatatactgttacgagagtgtaccgttatgcaggtagctacgcttgatatcgataccggttttcctaatatagtttcgctgacaccacttaaatcacaccgatcgcttaaagaaatccttttttacactgatcgcgacactactaccattcacaacgtcctagagaagcctgtggtggctgtttactgtttcaatgagctacaccactcatcgttgctattgcgtgcaaaggccgttgtattaaccgctgaggaggccttaccaagctttacggaaaacctcaattcttttcaaaaatcgttacagtatgatcgacccgtcatcatccgttgcaacccactaaccgtcaagattagatacaacaatgacatcgagttcagcaagctaaacgaaatctaagctcagttcttggagatgcacttatgaatggtccagatacattaagtgaggcacacttaattggcctcatcattgttcttataggcgtctacttcgccctatttggccacaggcatcattgggtacattggctaattgaccctgataagcccggcagcagcctgtggtgggcagccgtttttatcattatcggcgtgctcatgatgatggttagaaagatgcaatgatgggcaaacatgatgtagtgctattaaacaaaatagccccggtagcgaggcttaggaggtttgcggtatgatgacagattcaaatctaaaaagaaatactattagctttattaacatgaaaggcggagtcgcaaaaacaacattagtaaaagaaatcggaatacttctctcaagtgaaccttttaatcacaaaattcttttagttgatcttgacccacaggcgaatcttacgcaaagtctctttgaggtttacaatgttattgatacttcaaaaattaccacggtgcaagacatgagaaatgctgttaaggagcttccctccatctacaacctatacagcgacaatccaattgctccgccaacattaaacaaactgataaaacacttaagcgaaaatctagacatcatacctggcagtctcgattcagttttctatggtaaaaacaactctggtgattatgaacagtctcttagaaataccattaaacgttataagctaaaggataattacgattatattctcattgactgtccaccaacatattcgtcctatacggtttcggcaatgcttgccagtgatttctatgtgatccccgtaaaaccggacgcgtattcagcactgggtattgatctgttaacagaagtcattgaaaaaattaaagggtcctatgaagatacttttacattaaagccaatagacaatctcggaattatctttaccaaatacgactccaaagcaaaaagagaagcctcaattaaaaaagatattgaaacatcgaatcattttaaatatttttataagttttcctctatctttcccaagcaggacggcattgccactttgcaattaaactatgtgatttctcaaaactcaaactcaacaatgaagaatgctataatcaacatatccagagaacttttaaagagggtgaatgagcatgcaaagtgaaacctcggaaaagattgtttctgagcaacttgtaaaactccaaaaacaaaaaactacaaatgaaaggcttcgattttctctaattgctatatacggttctctaataaagtcaaaggttttttttgacaccaacgcggaccttcgcccattcgttgacaaactaccaacaaatagacgagtcaaggactatcttttaaaagcgcgtcctcaagttatagcaagaatggtctcagagcttagcgttgctgatgatgcccaactgaatcaattcgtttctgtggctgcagaatttataactagcgtgtcggaacataaagcctttacgcctgataataataaaggcactgcttcagacactaaacaggttcacaaaaaaaaggaaaattacattgacaatctcctcaataaatactctagaaagtccaattagatatgaacagatctgagtttatcaatgaatttaaaaatttacagaattgtgctcttccaaaaacctcttccctcgaaaaaaatcaaatatgcgttgctattgcaagtctgctgaatgagacgatggccttagatgaaattttacaagtttattccggatcagcttccaaaaactatttaagtagcattcaaagtatacatatgcaatatttatactgcatattaacaaataactggtttggcatgaaaagcctatacagaattaatagtgaacttcttcttaaattaacactactcgtttctgattcgtcaaagtcccctgtaccaatatctaaaactacgtttcgcttcttgaaagaagagctggctagagttaaattaaactccaatcagaggagaatgatcggaaaaatagaaaattacttctcaaaatattccgatatcattcacgataagagcactcatgacattcaatcaatcagttatttaagtgcacaaatatctaacgtttttttatttagccagctagacatggatattattagagaatttaataaatatttctacgtagtcctctttccattgtttaacgttaatttttatcgcctaggctctatcgaaagaacgcggctgaaagaatcagtaaaaattgataaatatgacctaataaaaaatgaatttttaaatttttaaaaatcttgtctgtttttctatctcatatgcaagattttttattttaaaggtaaaacgaacatacgtttgaattttaaccaaaaaactacacatagaaaggatatgaacgctgtgcgtaaatggaaagaagttcctcaccatcctaatgtttataggtatgaaacacgacgcgggactcgatatggtattcgtcgtggatttaaaaacagtgtaggaaaacgggatgaatacacaagatcgggatttacaaattggcacgatgcagaaggcgaattaaaacgatttgaagcatctttagtaacaggtggcattaatcctctaactcaccgtggtgttaccctgaatgcttattttgctgccttggtgaagaaccgtgaggagctcggcgtttggcggccagctacagttattcaaaaaaagacatattatagaaagcacctacaagaaagattcgggaaccgcccaatgagcaaaatatcaagatcagaatatcagcagtttattgatgagaagatcaaatcaggtttggctcaaaccacaatgcgtacacttaactcagtcatgcagatcgtcatgaacgacgctgagcacaacgatattatccgtaagaacatgctcagaggcatcctcattaatggtgccaagttgcctaaagatgtttccattaccgatgaagactatgcgaaattcatggccacagcccagaagctcttgaataagtatcagcttacaatgctgtaccttttgactcttggtgagcggcgtgaagaactcgctggcctccaatttcgttcatttaaacgaggaacaaccgaaggcaagctatactatgaaatcacttattatgttggcagaacgccgcagcagccattaggcggtcccttaaaaactcctagcagctatcgcacaaactatgtgacaggcccaattattgactacattgactattcccttcagtatgcaaagaacattttgacacgtactcatcgagagattgggcccgagacattcatatatctgaatgagaaaactgggatgccggttcatccgagcaacatcaaccgaaatctgtttcaacgtgttaaagaggcaactggaattgagcttcgcccgcatatgttgcgtcactattttgcaacccaagcgcttcaggacggtttgcctcaaatgtccgtcatgcactggttaggtcacaaaaacatcgacatgacaaacgactataccagaccaacacgagaaggcagtctgaaagtcattaacggcatgggcccgatattgtttaaaaacggtaccgcgggccctgacggtacaaaatgattttgtaccgccgcttgtaccgtcatattgtctcaaacgatccgaacatatccaaaacgaaatcaaaaaagcaccccgtccttcacgcaaaaaccgtgatagaacgagatgctttcgtttcattagcagcaaaggctatttgagggtaaccgttgcgccaacgccttcaagttgttccttaagcttgttagcgtcgtcttcggaaaggccttccttgataaccttaggtgcggcgtcaaccatacccttagcatccttcaagccaagaccagtgatttcacgaacagccttgataaccttaactttttcttggccagcttcggtcaattcaacgtcgtaggtatccttagcagctgcagcgtctgcaccagcagcggcgccagcagcaacaggggcagctgccttaacaccgaattcatcttcgatcgacttaactaagtcgttcagttccaaaatggaagcatctttaagttgtgcaatgatgccatctacatctaaagccatgtttgtttcctccgtttattaggtagtttgtaacgtatcattatgcagcaggttcttcgtctttggcttctgcaacggccttgacaaccaatgcaaaatcgcggacaggtgcctgcagaacagaagcaagttgcgacaacagaccttcgcgatctggcattttggacatttccataatggtatccaaagaagcaaccttgttttcgatgatgccgcccttaatcttcaaagcatcaaattggtcagcatacttggccatgatgcgagctggggcaacaggatcgtcattggagaaggcaacggctgtagggcccttgaaaacatcgtccaatgcttcataaccgttagcgtcagcggcacgacgcaggtaagtgttcttcaggacttccatcttaacaccggcctcacgcaattccttacgcagtgcggttacttgttcaaccgttaagcccagatagtcgacaacgacagcactggtagcactcttgaattgttcagaaatgcttttaacgatttcagctttttttgcgatagcttgttcactcatgtttttttcacctccattagtttggttgaagtttttaaatataaaaaaactccatgtctaccaagacatagaggtatctagtgtttccgataccacctcggcaggataattaaggcttacgccccctgagtcttaggcagagtgaatgatcacaaagagtagaataccatggtcaccgacctgtgtcaaaatgttttgcgaaaaagaaactttgcaggccggccaatcccatgcaaggtcttaaacgctcgcaaaacagggcgtggttttttagataacagacgccattgtagattgcactttgttattcgtccaaatttgttatccatttctgactaataggctccttgctatcgaattgtaagccccctctgattgaggtatattaattaggtaactattttctgaaaggaagttggcgctcttgccaagtaaacttaaaagcctcgagccatggcagcaaaatctggctgtgttatggctcggaaccttcattgccggcatgggcttcagtgaagtttcgccatttatttcattatatgttgatcaacttggcgattttaccaaggggcaactgagtatttactcagggatcacgtttggggtcaccttcatggtcgttgcgatcgtgagtccgctctggggccgactcgctgatcgccgcggtcgaaaattgatgttgctgcgttccagtttcggaatggccatcatcatcggagcgtgtggctttgtccacaatgtctacgccttaattgccttacgttttctgcaagggctggcagcaggttacattccaaacgccagtgccttgattgcaaccgaaacaccaaaggcaaaaagcggcactgcgattgggattctcacaaccggctacgtttccggtaacttgatcggtccaattctcggcggctttcttgcccagaccttttcaatccggctgactttcatcatcaccggcgttttgctgctgattgtgtttgtcttgagcctaacgatggtccatgagcattacacaccggatccacgcttgctcaacaaggaaaaacgcccgagtttattgtctcaagtcaataatccaaaagctatcatggtgctattagtctccaccgcggtgattcagctaggtaatatgtccatttatccaattatcagtctttatgtcaaagagttgatgcacaatgttggtccaattaccgttgttgcaggcgtcattgcagctttgccagggatttccaacctcatcgcggctccgcgcctaggccagcttggtgatcgcatcggctcaggcaagattctggtcagtggcttgattttcgcggttattatgtatattcctcaaggcattgtcggcagcatttgggcgctcggtttcttgcgtctcatgatcggcgtttcggatggcgcgctgtttccaacaattcaaacgcttctgtctaagttgacaccggtgagctataccggcaccgtcttcagttggaatcaaagtgcccaagcctttggttccatggctggctcgctagctggcggcttcatctcaaatatttttaattataatggtgtttttattttcacagccctctgtttagcgcttaacctagtgatggtgctcgtctttattccacacatctggtcaagccgaccaaaacaacaagcataacgcatcaaaaaaaccgacctgcgtgggcagatcggtttttttattgtctaaattaaatcactgcatccgcttagcatcaagcaatagctgccaactgatcaatggttttgggtctgggagagctaactgttgatacacagtccacgcatgaatatctgtatcatcaaattcaccattcaccactgaatagcgcgcctgaacttgaaacaatgccgtttgcaataagcgacgaatgtcagcaaactgttggccgcctaaccatgcactggttaatgctcccggttcatcttcaaaccaaaagacatatgcctgcacttgctggttttcgactaagaaacttggttgagtgtcctcagcttcagccaattgttgttcaaaggttgcatggttaaaggtcaccggattatctgcatgagcagcaacatagtttgcaaaactcatttgcactacgtcatgccactgtgccgacgtcaactgggaccgtgaccgaacatcggcctctggggtagcgacaactttccgatagtcactcattgccgtacgacgaaaggccctgaaatgcttcgcctgcaattgcgtgataactgctgattgggcagcataactgctgtactgcagccgatcatgatgatcggccaattgccgcaaatcttcaagtagttgcggcaaccacgcaacatcacccaccacatcaaaatacagcgcattggcatgaaatgaattctcccatactgctgcagcaaacgtcacagcaccgctttgcggatatcttagtaaaatcgcatgacgattagcaaaatgttgctgtgtgaatgcatccgctgatgccaagaaaggttgaagcatcgtcagtgtcaccttctgaccagtaagcgctttgccctcacgcatccttcttggagtccttcttgtcttgccatgtgccatgcagtcgggttaacgaataagcataacgactggcaccgtagacgatcgggaaaatgaatccgatccataaatgattggcaaaataatattgcggtaatggattcatatccatggccgcttcgtaagccatctcaaaagcaaaaataaacacgcccattaacaccgctgagagcacaccacgcacgaccgccagccattcataccggcgatattcctccggcgtatctgcttcaatcacatgcagtcgataatgccgcagcgtgatttcattcatcaggttaatcacgatcgtcacaattaacaaaatccatgtcccggcactaatcattttaagactattagcgtcaataaaaatagcgattatcgttgcaatcagcaacatcaattcagcggtcagcatattgcgccccatgatagcgtcataggtgcgttgtttaaatcgatctttgagtgaaatgccataataccattctgtgattttcttcataggaaccctcttctatttattaattaaacaatgttccaatcttaacacggatcgccaatgcctttttcatgaatcacgcgcctttaaaaaatttttccgtgacaataaactacgattcgtcaaggaaaaatctctgtgtctgttccagttgtcaaaatattgaaattttcattgacatcacggtttgtttttggtgaaatagtaaacaagcctagggtgtcaagacaccctaggcttcattaaaggaggagcgaaaatgtcaaaaaaaccgtccggccatacgcggctgatcgttggcatcggcgttgcatggctgtttgatgccatggatgttggcatgttaagtttcgtcattgcagccttacatagcgaatggcaattaagtacggtgcaaatgggctggattggcagtgtcagttcaattgggatggccgttggtgccattttattcgggatgatggcggaccgttttggccgtaaagcgatcttgattcttactttgctagttttttcaattggcagcggcatttctgccttcgccacaagttacggcatttttcttagtttgcgattcatcatcggtgcaggcctcggtggcgagctgccagtggcctcaaccttggtttcagaaagtgtgccagttgaaaaacgtggtcgtagtgttgtcctgttggaaagtttctgggctgccggttggctgttagcagccattatttcttacttcattatgccaatctggggctggcgcgttgccgtctttgccactggtttagccggactctatgcgttttattttcgtgaaggcatcaacgaatcgcatgtctttgaaaaagtggcgcggcccggcttgctcaaaaccctcagcaccctttggcgcccgccttatgttcgcgcaaccttgatgctgtggatcgtctggttcatggtagtcttctcttactatggcatgtttctttggctgccaagtgtcatggtactcaaaggatttagtctgattaatagttttggttacgtcttaatcatgacgcttgcgcagttgcctggctatttcgtcgctgcttggttaattgaaaaatggggacggaaaatggtgctgagtctgtttctgctaggcacagccgccagcgcattaggctttggcctagccaccggtttgccaatgctactgactgccggcatgttgctctccttcttcaatctcggagcttggggcgcgttatacgcgtattctcctgaacaatacccaactgttgtccgcagcagtggttccggtatggccgccggtatcggccgcatcggtggtgtggttggaccgttgttagtcggtcatcttttgggatcacactggtcagttggcggcatctttagcattttcaccgctgccatcctcatagcagtcctagcaattatcttcctcggccaagaaaccatgggcgtgaaacttgccgacacgcttgaatagtctcaacagacaacaaaaaagccttgtaatttgcgagaattcccgcagactgcaaggcttttttactgaagttaacgccgtaatgcgcgagtaaccgtttgttcattaacaaacgtgaataacccgagatcgccaagttcacgtccatagccggagttcttcacaccgccgaatggcaattcagcattatagttttggctttgattggcaccaaccatgccggtttcaatccgagctgcgacttctgcagcgtgattagtgtcacccgcaaagactgcgccccccaagccataaggcacatcattggccagttcaaccgcttcatcttcactgtgaaccttgtaaacgcaggcaactggtccaaacaattcggtacgataagccggattgtcctgatcaatgtcagtcaaaatagttggctggaagaaagcgcctggcaaatcaaccggggtattgccataaaccactttagcaccgtgagcaatagcttcgtcaacttgcttctgcaacttgtccttcgccttttggctggtcatcgggccaacattaactgtgggatcactcggatcgccaattttaagattctcaaagcctttcttcaaaccggccacaaaatcatcgtaatatttatctaaaacaatgaaccgtttcgaactggtgcagacttggccgcaattcattaaccgcgtcttgatagcttcaggaatcacagtatcaagatcggccccgtcaagtaccaagaaggcatccattccgccaagttccagcaacgacttcttcagatatttgccagcaagtgctgccacttgcgaacctgctcgctctgaaccagtcaggcagaccccagcaacccgcggatctttaatgaatgtttcactatccgcatggccaatcaaggcaatttggaaggcgcctttatcagcaccgccacccagtacagctttttcaaattcaagcccactagctggcacattgctcgacggtttgatgatgactgcattaccaaccataaagttcggtgcaaacacgcgcatcaattgataataagggaaattccatggttcaaccccgaaaacaatcccgcttgcaagatggttaatcacaacagcaccagcagtactattgatcggttgcggctgcaacaaagccggcgcccgatcagcatacatgtccgcaatctcagcacagagttccacttcaaaaagtgcttcttccgtgcgcttacccatttcttgcgtaataatcgctgccatttcgtcagcgttattgcggaaataggcagcaactgcatgtaatgttgctgcacgcgttgctggattgacgttccgctcctgcttgtaaaaagcgtgcccagttgccaacatctcgctaatttgcgttggtgtggtatttgagtaagttttttctaaggtattcgtgttcggatcaatggtctgataagccataattgaaaacgctcccttcatatacttacttaatcatagcttattcacgcctcatatgccaactttagcaaattaatttactggcttttaataacgtccacacagcaattggtctatatcttttgatacatcggatcaaaaaaagacccgcagcgagtgcggatcttcatgtcatgctagattcagattagaagtctgaagggttaaccttgatgccgggtgccatggtagcagtcagcgccaagctcttgatgtaaatccccttcgtgcttgctggacgagctttcaagacaatatcattcattgctttgaagttctcaagcagcttgtcagcatcgaagctcttcttaccgattggggcatggatgataccagccttgtcaacacggtaagcaacctgcccagccttgatgtccttaactgctttagcagtgtccatcgtaactgtgccagtcttagggtttggcattaagccttttggtccaaggacacggcctaaacgaccaacttgagccatcattggcggtgttgcaacggcaacgtcaaagtccaaccagccgtcttggatcttctgaactaagtcttcagccccaacgatgtcagcgcctgcgtcttcagcagccttggcttggtcgccttgtgcaaaaacgatcaccttagcagttttaccagttccgtttggcagcacaacggcgccacgaatctgctgatcagcctgctttggatcaacgttcaagcgataagcaacttcaacggtttcatcgaacttagcaaagtcgattttcttaagcaagtccaccgcttcttcaggggtgtactgcttggtcgggtcaacggccttagcagcctctaaatactttttaccttttttagccattctgggttttcctccttgcaaatgtggtcactgggagataagtttttctcccttccacctgattcgctcagctttcactgagaatccgaacagtgcgtcttagccttcgacttcgaagcccatggaacgagctgttccttcaaccatgcgcatagccgcttcaacatcggcagcgttaaggtcttgcatctttgtttcggcgatttccttgacctgatccttggttaccttagcaacctttttggtgtttggttcgccggaaccgtgttcaacaccagcagccttcttcaaaagaacagcagccggtggggtcttggtgacgaaatcgaatgaacgatcttcgtacacagtgatcacaactgggataatcatgccggcctggtcagccgtacgtgcattgaaatccttagtgaaccccataatattgataccggcttgcccaagagcagggccaaccggaggagctggggttgctttcccagcaggaatttggagtttgacaatgtttgctacttttttagccacgagacatacctccttaagtccgtgatgtggttatgatggccagaagttttggcctcccacgcgtatgctgaaaacatacttgaatagattatcattttacggggtaaaacacaagttaaactcgtaaaagcacgtgaaccagtaggactcacattccaacgataacaaacacattcttgttaataattctattttgtgcggtttgtttctgacattcagagcggccacatagcggcgaggactggcgaccgcgaagctagagctgtaggcacatttttgaactcgcgtacgttcacagccatggccgtccacgtttgaggtaacccgcttttgcccattcgaccatccccagatagactaagacaatgatgacggcgcctggccagtaagctgctgggaggatgccgaagtcgaaggctttgtggagcggggataggatcaggaagaggccgactaatagcgccatcatagtggagagaatcacgatagctgaggctggggcgcgccagaatggtactttacgggtacgcaggacatgaatgaccaatgattgtgtgcagagtccaaccacaaaccaacctgcctgaaacatgtgttctgcaggtaaactcgcggcatgtgcgccaacgcccagtccgaaccataagaacaggaaggtggtaatatcgaaaatcgagcttagtggtccaaacgtcagggcatagcgcagtagaccatcggcccgccatggtgtcggcttcgcgagcgtgtcatcatcgacattgtcccaaggaatggtcatttgtgaggtgtcataaatcaggttttgaagcaacagttggatggacagcataggcaaaaatggcaagaaaatgctggcaataagtacggaaaacgcgttcccaaagttagaggcgatcgtcattttaatgtacttcatggcattagcataaacgcgacgaccctcaacaataccgtcttccaacaccagcagactcttttcaagcaaaataatgccactgacatccttggtaatatccgccgcggtatcgacgctgataccgacatcggcttcacgcaaagcggcggtgtcattgatgccgtcacccatataccctaccgtatgcccagccccttgagttgttttgatgatgcgggctttctgcatcggactcagtttcacgaaaagatcagtggtttcaacagcttcgagcaaatcattatcggtcatggcatccacttcattgccgctgatcactgcttgctcaggaatcccgacttcttcggctacgtgttgcgtgatgatcgcattgtcacctgtcagcactttcacccgaacaccatgggcatgcagcaagctgaccgcttctttggcgtctggcttggcgggatcgagaaagcctaaaaagcctgccatgaccatatgttgctcatcatcagtcgtgtaaatgcgttgttcatggacatccgtacgataggcaaccacaatcatgcgcatgccttgcccactcatcatggcattggtttgttcaagctgacgtttgcgttcgtcagttaacggtaggatctcaccatgaagctgaacctgatcacagaccgccaacatttcttcaaaggcaccttttgtgatcatccattggtggtcgtgattggctaccaccactgtcagtcgccggcgttcaaaatcaaacggaatttcatcaattttttctaatcccgctggcaagtccacaatttcgtcgtgatgttctttcacataatcaaccacggctgtatccatgagattgtgccaaccggtttgataattagcattcatataagccaaccgcagcactgccggatcggttttgccggtggcatccacataccgcatcaccacaacccggtcctcagtgatcgtgccagttttatcggtaaaaagcgtatcaatggcgcccaaattttgaatggcatgtaatcgtttaacgattactttccgcttcgacatcgccaaggcgccttttgctaagttgctgttgacaatcattggtaacatttccggcgtgagtccaacggccactgctattgcgaagaagaaagcttgtgaccaatcctgcttcgtcacgccattgatgacaaatacgactggtacgagcacgagcatcatcccgatcaacaaccgactgatggctcgcataccgcgctcaaaactggtcggatccgttttgccgctaatctgactggccatatcaccaaagtacgtcgcatccccagtcttcaaaataactgcagtcccagaaccggaaataacgtctgtgcccataaaaactaaattaggatagtcaaagacactaatatcagcatcctgttcgtagacttcagcacgcttttccactggcatcgcttcgccggtgaacgaagactggttaataaatagatcgtgggtagccactaaataggcatcggccgggatcatatccccagtggcaagctggacgacatcccctggcacgacgtcatccatcggccgttcctgcgtctgaccatcacgcgtcaccgctgttgtgttcgcaatcaaggcagccaaggcatggctagctttttgagagcggtattcttgccaaaaatgaatcgtcaccgacagcacaatcatcagactcatcatcatcgcgccatcatagtcagctgtcgcagtcgatactgccaccaaaaagaccaacacccagacaaacggttcattaaaagccgaaagtaaaatcaaataccatgggcgcggatgttgggtcacaacagtattcgcgccgactgcttctaagcgatccgcagcttcggtactgctcaaaccatctggattggttttcaatgcttggtagactgcttgatcgctcatttgactgtagcgcgtcaatgctgccgttttttcttgggtcgaggcgccatgccccgacatcgtcttctttagcatgcttattctcctataagatacgctggcaggccaagaaaccgtcaccatgaggacaatagaaaaatgagcttgatacacccattctttccgtgatcatgtatgatgaggttgttgaacgtgctagcatatgcgcttaagtatcccccaaacgtgtaagcgtgcgggcaattaactttaacaaaaggttaccgtgaatgtaagatagttgtcaaagataaccatagtaaggaaagcctaaaaatttttaaaggggaggttcatgatgcaaaaatctgcacttgatcaagccgctgctattcgcgccggggtgctgtctccagcagaattgattgatagtactcgtgagaaaatgacggcattaaacccagcgctcaatgccattacctggacccgttttgaagcagccaagcaggacgccaatcaactggaagatcacggtcaaccgtttttcggcgtgccgttgatcctgaaaggcttgggtcaagaccttgctggcgctccagcaacttttggcagtcgcttcttcgccaaagccaagtccgaacacaccaataactttgttaaggccttgcaacgactaggcttcatcatcgttggtcaaagtaatgtaccggaatttggttttaaaaacatcacagatgcagaactttatggccccgctcgtaatccgtggaaccgcgactattcgccaggtggctcttccggtggcgcagccgcagttgtggcttcaggtatgagtccgctggcaaccggttctgatggtggcggttcgatccgcattcccgcttctttttccggcttgatcggtttgaagccaacccgtggccgcgtgccaaccggacctggtgagtggcgtggctggcaaggagcatccatcaacttcgccttgacgaaaaccatggccgatacagcggcgctacttcgtgggcttgccacaacccagctagctgctcccttcatcgcgcccccattacgcttagatcttgttggcgatgcacgaccactgaagattgcttacaccacaacatcgcctgttggcacccctgtcagtgacaccgctgtcaaagccgttgaaaccgcggcggatgcgttgcgagcagcaggacaccaagtcgttgcggctgcccctgatgttgacggtactgctttaatgaaggcgtgctacatgatgaacggcggcgaaactgcggccatgtttcaggcatttgccgcccaaactggcaagcaggccaccgctgccgacatggaattgattacgtgggcgatttatcaagccggcttgcacacctctgcagccgactacagtctttcacttgatgcttgggatcgcgcagcagaagcatacagccattttcatgagagctacgacttgctgctgagtccaacaacagccaaaacagcgccccgcatcgatgccgttttacaatcgccggccatcgttgttaaaatgcaacacgccgctgagctggcaccgcaggaacagcaagatttgatttgggatctttttgaacccagtcttgaatattcgccattcacgcaacaagccaatctaaccggtgcgcccgcaatcagcttgccgaccgccatctcacctgaaggcttaccactgggcatccaattcaccgccgccaaaggccgtgaagatcagctcctgcgcatcggctactggtttgaacaacaaggcttgttgaaaatgttacctgcatcgctaaaggagaagatctaatgggctcacttactgaatggtaccaacgcattcccacgcctgatgatttaacccgagtcgaatcactttttgctaacattcaggcgcaattcccgcaactcaagctcgaactcaagtggaatcagcccatgttcactgaccatggtacgtttattatgggctttaatccgtccaaaaagcaccttgctgtagccatcgaaccacaaaccatgacgcgtttcatcccgcaaatcgacaaagccggttacgaccatagccaaatcattctctttccatggcacaaaccactagacgagcagttgatccgcgacctcatcgcctacacgattgaccaaaagaaagatgcgactactttttggcagcgataggtgtggcatgattttttgagaacaaaaagccttgaatccgatggtatctaacgtttgctatcctcgaatcaaggctttttattttgcacctcacttgctttttacctcatccactccggctctatagttcacgtaccgcgccaatgcgaacagatagtcggacaagcgattgctgtattgtaaaatcaccggctcaagcggttgacccttagcgtccaattgatccaatgatcgctcggcgcggcgagccactgctcggccatattgcaaagcagctgccagcggatggccgccaggtagcacaaaggctgtgattttcggaaccgccgccatcattttatcgatcgccgtttccaatccctgtacgtgatctgcggtaatcgtttgatgccgcggcaccgcaacatcggccaacagctcgtacaattcgcgctgccgagcttcgaggtcctcagccaaccaatcaaagtctggcgtggctttagcctgcgaggcaacatagcctagccatgaatcaagctcgtctaaatcacctaatgcgacaatctggggagaaaactttggcacctttttcccgttaatctgtttagtggcaccatggtcaccgacttttgtgtaaagtttcaaaatgtgcgcctcctcgatcaaaacgttgcaagccctgccgtaaaatggcgagtacgatcgggtaaaaaactagattaccgatggcatgatacgtgtcaaacgataacccactcacatagtacgcccaaaagccgagaccattcaaactgccaatcaccgccatgcctaaactgacaatgaagccgtatagataccctagcaagccggcaagaccgatttgcagccaaattcggcggcgaataactggcaaaatcgttaccataacaatcacaatcaccatgcagcacgcataagcaacaatctgcggcagtgtccagagtccaaagccaagaaataaattggacacgatcaaggtgctcatggtcaaactgaagccccagcgaaagccgagcaacagcgtgacaatcattaaaatatcagtgacaggctgcacattcggaatagggactttaacaatccgcaaatccgtacataaagcggtcaatagaccaagcaaagccaccgcccgaacaggcgatggctttgttactgatggctgcggcttcatttggtgacactcaggtcaaacaccactttatcgtgattcttgaccggttgttctgtcgctcctttttgggccatcttgccattaatcgtgtagagccagtaagtctttttggcaacattttgctttttgccagcaatttcggtaataaaacctttagaagccttcactgtccagccttttttcaagccagtcatgacaaccgactttttaggctgatcaatcgttttcttggcaaaagccttgccattttgtttcaactgataagtcactacaatctggttagacttgctgctgcttttggccgcatttccagaactgctgcacccagccagcacaaacatcgcaacgaaaaagaccactaatgaacgtaaaacttttttcaaaataaactcctccacacttttttatttaattgggcaagcgccaccggcacaatcggtttgatcaacgagctcaaggtccttttgatcatgatccgcgttttgaaccgcaaagacagctgcaacagaaccatgaattgcggcacacttttgcttgtaagttttgacatcaatgggttccttaggtgcctgtttgaaaccagcacctacgtagggcaacatcgacgtcgacttaatgacatggcgatactgggaaagcaaaccagcaatttgatcggcttcttttggttggaaggtgaccgtgcaactgaccgcgttgtcagaccagtacgtctgcaaaaatgcttgcgtggcaatctgttcagcaattgacaccgttccagctgaggcaaaggcaggatcatcagcgtgggcggcgcgaattgggaattcaaccaccatcgtgcctttcgtgtaaacatctggttcaatgtgataaccgcatgcctgcagagctggtaacaacggatcgttgccttggaaccgaatgcgctgaatcagataaccagcataatggaaatgcatcccttctgaaacgccggcaagtttcgccacagtccctgaaggtttaaccgttgtatgttttcgcgacggttcgcagcccaaagcatctgagtaagcctgatcggcatcgaccacagtgtgatacaaaccatcaacggcttgtttaatttccggatcgtaaatcggtttctggaccattttgccagtttgcggatcaacgactgactcaaacccgctcacaacccgccggccaaagtcattcaggaaccagtcttgaataccagacatggaaacaccgatacgccgattcttcttgatgatatcacgcgaaacctgccagtcataatgactaaaggtcacccgcttggcgaatcgtgctgccaatgtgaaggcctgtttcagcttccatccttgctcaactgcaacaactggaaagacttcaaacagattgcaaggttctccattggccaaggaaatctcaccgcaagggttggtaccctcaacatcaggatcattttccacattttcgccatcagcaattcgaccaaaccgccgtgacagttcaagattcacaatcccgggttcgccatttttggcaatggcgtgggcaatcggcgagtaagcatcgaattgtgtattgatcgcaacactattgttcgacgcccaacgatgatgataaagctgcttttgatcctgcttcatcgtgataaaatcgtcatcgtctgctgagccgagtgacatttcagcggagcgccgaacattgccagcaacgactgttttaccgatcaaattaccaatatcagtcgcatccaccgccgtcaagtgttggccaacgcgagcattgagcaacttgttgatatccaataacatctcaatcaatggcatcggtccagaggcagtaccgccaaaaccgtgaattcgtgcaccctttggccgaatgttggtgatatctaaaaccagttttgtctgaccgcttggattagtcgcggcaaaatgatggtcgatcactttcgcgttggctaacacccaaccttctcgcgtatctggcaaggcacaatgatcagcctgttcaccggcatgtgctttttcccactcgtcacggtcaaccgcacccattttcaaagaatcagcataactcgcgctattgcggccaatcacaaccgtcaactcaagcttggtcgcaacaggtggcagctttgcaatattatcctttgtcaccgaaaacccaacgccgccgcccttcatcagttcatcaaacatgaaggagtatggcatcgacacagccggctgcgaggcgggataatcttcaggcacaatgtgtgcttggccataaggttgcgggcgaatggcgatgaaccagcaattgttcaaggcatcgccattgcgcttttgataatctgttccggaaatccacaaattacggcctgaaggtgtgcccgccaaaccataaatcagtttaaaaagattccgtgcttctttttgcaatgtttcaacgaccttgggatcaggattcgctgtatgtaggcgcggatcaaggttaatgttaccttcaaccacgcgcttgacggtttcgtcccagttttcagtgcgttgagcatctggcagccaccgagcataagtacgtttataagtgacccagccaagttcaccccaatgtggttttatttcttttttaacctcggcaataaaagctggtgccaaggtgattggtttcgtcataacttgcatatccgtacctcccgtatacaagatatggtatatcctcatggagtttatatcaagatatagatttaacaataacaactggttagatgacggtaactggtggccgacagtgcgttcgccttttccagaaaatcctaagcaaattaaaaaatcgtcagagcaaaaacgtctccgacgattcctatgtgttcaagttagaaaaccggaccaacatatggtcgaaccagcacatgtgctaaatctaacgtcttgagctcggcaatttcttgaacaaaacaagtgatcgagccagctaacatcaggttcattggcatcttgccaacttgaacggcgacgatcggcatatgatgcgcataggcgtacccgatttcaaaagccgtgccaggatcaggtgtatcgccaacataatctaggatagccaccatggttgtcgcctgatgcaagccttgaatgtcttcaccaaagacctgacgctgccagcctggtgagttttcttccaatttagctttattagtatcatcgcggggtgagaaaacaccggtcaccgacttgttgacctgcaatgctgccaagacttgatcaagtcgctttgtttgagccgcatcaaagaatggtgcggcgacatagatttgtgccatttagtttcctcccacttttgtgacgtgaccagcagcactaaaaatcacgctgccgctgccataaatattcaacaatgtcgtgatcgacaagccgattttcatgcaacaggctgtgtgcagcccgcgggccgcggatcacgacctcggtataatctttgatgcggtctttgaccaaatagcgaattgcaaaactgctattgatcgccacttcaccatcatggcggccgccaattagtaaatcaccagcgatattcagccaccgcagatttgccggtaaattaccaattgtcttttgaaactgttgataaatcggtgcagcatgttccggcccggtgcgggtcaaccgccaatttaagattggtgatcgttgcgccacctctaaatcattcatcggcgcagcaatcgtgactagattagcgacaggcactgtcggcttgctcaaaagatataagacagctgtgacaccacccatcgaatggccgacaatgttcacctctgcaaacgcctgttgcgtttgcaacgctgcgattaccttttccaagccatgcaactgagctgctggacgcaccgccttatctgtgaacaacacttggactgctgcatgatgatttaggttaagctgcccacgcaaatgcaccttgccatctggcgcaacaatcgctacaacatctttgctgagtccataacggcgctggagccgccagagcatatgcccaaacgaatagcgtgtgccaaggtgcccaggaataaacaaagtaggtaccggatccatcaccagcggaaccggttgataccccggccgtgccagcaacaaataatctgccagaccgcctacaaccacgacaagaccaatggccgcaacgatccagaaccagccgctcatgagctaagcctacagcttgtcgacttgatcgaaatccagttccgcggtaacttcgcggtcgaacatttcggtgacaactttcaacttcatcttttccttatcaactgccgtgactttaccgtgcataccggtgaaggcaccatcaataatcgtcactggttcgccaacatcgaattcaacgtcattgtgacgggtactcatacccatagaatgcaaaacattggcaacttcttcaggcaatagtggtgcaggcttagagccagcgccgtgagaaccgacaaagccggtcacacccggtgtgttacgaacaacgaaccatgattgatcagtcatcaccatttcaaccaacacgtaaccagggaaggtctttttcatttcgatcttctctttaccattcttttgttcatgttcttcttcttcaggcacaaccacacggaaaatataatcgtccatgttcatactgctagtccgctgttcaaggttggtcttcaccttattctcgtaaccggaataagtatgcaacacgtaccagcgtttttctgccgatgtaactgtttcagccataatgcgtctcctttaagtgttttgagtcaaaataaaaaaccgtcatcgaaggcggtttttgcactgacaagagtataccaaaaaattggcggtttgtcaggcatcagtataggaaagcctgaaagatcatgttaatgacccaatcaactgccgcaaaataaatggcaaagataatggaagtcatgatgacggtgaaggtatcacgccgcgtttgccgagcagtcggccaagtgacggctttcatttctgcgaaaacacttttgataaatttcatcattctgctccttccatgtttactttgtctcttgatggaccgttacccggccacagtgtttacaaaatttttttaaggttaatcgttctgttcgttttgggttttcgggaacaaaataattccgttgcccacaaaccgagcaagcaagtgctactttcttagctgtcatcatgttccctccagtcacgtccaatatcttaccaagattatggggagatggcaagcagtgagggtgagccataattttttcgtaggacttgggcttcattcaatcccgaataatcgtaggaagatcctaggcgaaaagttttcttgccgtgccaaggcaaagcaatcaataatccatgagaagtcaaaaaagaatacccaaccacagcgtcagcaacaacgtaccaccaacagttaataatgattgaatcgtgaaaataaaggttttatctttacttggtttgcttgtgtaacggcgagtattgttgcgtactagcggccaagttgctagcactagcaggctccaaaatggtaacgcgcgggttaggacacctagtatcagcgcagcgaaagtgatgaacgggatgaggcggtaccattgcaaggcgcgtttgcggcctaggaagtatggcaaggtgaaacgctggtttttgatatcttgatccatgtcggcaatgttgtcagcaaacatcacggcggcatttagaatgataactggcaaagccgcgagtaaaagttgcaggagccagcctagatcaaatgaaaaggtgaaggtgcgccgtcccaacatcaaattaagcggacttggggcgggcatgttgatcagcacagcaatgatgaaagcaccataaccttccacaaaaccggctaacagctcacccaggggcaggcgggacaaaggaaccgggccaaatgtatacagaatagccacaccaacaccaatcgcgccgatcacgagcagactaaggttggtgcgcatgaccaaaatgatgcctaatatcacactcaccagcaaaatcacgatggtcaaggcgagcatcccccacggtgacaggtgctcacggccaataatattttgccgttgctgatagctttgatctttggctttaaaataatcctgaacattgttaaaaccagtcacaaacaaggcaatcgctaactgcgcaagcccatagatcaggctgttgacccatgaaaattgctgaaatgcccagcctgcatagctaatgcccagcacaaatggcaacatgctagccgccttagcgggtaatcgaataaattccagaaaaagtggccaagttaaccgatgatatggttcgctcataggatcgcccccattcccaagcccaagaccagtaaaccattttcaataacgagattgatgaccgcagtatgaaaagtacgctgtttgctggggtcacgaatgaatcggtggacatttttgatcacaagcggccaagcaagttctatcaccaacgtccaagctggcaatgcgccaaaaatgacgccaaaaataatggctaaaaacccaacatacgccagcagcgcatacacgcgtggcgaccaccagctacccaaatacatcggcaaagtgtgccggtgattacgctggtcctcatcaagatccgacatgttattggctaacataatattagcaatggttgccataggcgtcacgcaagccagccctaatgcaatgatggcaataaagtccccgcgcaagacaacattcggccacccaagatccagtgccagcaatcgacccggtgcaatattgacatacgtggcaatcactggaatgcccagtcccataacgataccagagaagatttcaccaagcggcagccgtgacaacggtaacggtccccatgtatacaaaatgccaatggcaaaacaggccatgcccatcaataatagtagccaatctgtccgccaaaccagcaccaagccgatcaatgaggcgacaatcagcataccgataatcattttttctaccagcttgggcgctaaatttgcccggccaatgacattggtggttgtttgataatgtgcatctttagccttacgataatccatcaaattgttaagtgcagtggtcatcatgtcaaaaagcagcatcgccataaaaaacaggatcgtattcacggcattaaaagtgtgaaaatacgtcaccgcaaataaagtgccaatcgcaaacggcaagatactcgcaagtttcgtgcgaatttcaacgagctcaaaaaataccgacaacggcataaactaccccccttatttttttaacgtcgcaagtgtatagcctgaatccttcaaaagcttaaacttgtccttcaaccctgagctgacataaacctttttatctttcgtaataaaaatagcatcggcatacttcagcttttcaatataggccatcccaccagctaagcccttgtcaaatgttgcggttgacaaggcatcgccatcgacactctttttggtcacaatggaaacgcccattaagttattgtcgaacggatagccggttttaggattcatcaaatgcatatagattttcccatcgaccttgagataccgttcataaataccagaggtcacgaccgtcatgttgctagctggcagtgtgccgatagcggtcccgcgtggcttcttcggatcttgaatgccgacgttccaatcttttttcacgttctttgggctcttgcccatcacataaatattaccgcccaagtcgatgatcgcagtggtcacgttcttggccttgagggttttaacaacttcatccgtaataaacccttttgcaatcccgccgaggtcaatcgccatgccctttttcttgagataaacggtttgcttcttggcattcaaaaccacatccggataatgcaccaaaggcagacgctcatcaatttcactttgtgctggctttcgagcatccgcaaagcctatgtgccagagactggtaatcggaccgattgccaaatcaaaagcaccctcggaattttcgctgtaatgtttggcagcagcgatgacacgataaacactgggggtcacgtgcacaggtttgatgccagcatttttgttaaccgcatccacctctgaccctttttgattgaccgtcaactcatcagccaattgttggacgcgggcaaacgccgcatccaaagcaccttgcttgtccttgtcatagattttcaccgtcaccacggttcccatcagaaactgggtatccgaatacggatcgccttcgactaacgtgcgctttgctgccgttttgccggcacaggccgttgcgactaatgccagtaacatcagcagaacgactacaaatcgtttcttcatcattttcctccaaacgtccgcagactttgaaacctgctcgcgctctgtcattatatagggactttgcggcataagaaaagaacctgttcaaaaaagttctgaacaagttcttacttggttgagcaatcgtactagaccgattgcatcaccgaacgtcacaaaagtgtgacatcacattagttgttataaacaatattgtcgacttcaatcttgttagtgttgccattttgagcagcattgacaagttggtcagcatacaagatgaaggtatcggaactgtgggtcgcaccggaaacaacatcaaccttggctggtgactgtttagcaaccagtgacttattcagttcaggaatgtattccttagggccgactttgttgaccttcttcatatttgcttcgtacttcgtatcaagcgtcttggacttgccatctttgttgatgttgtcgtagttgctctctgtgatcttgccatccttaactgtgatggagaaggtgacacgataaccgttgaagtagttcttttcttcaagtgtgtaggtcccgtcctgcatcttgccggtgttgttaacttcgattgtctttgtatcgccagcttgtgcagcttggatcaattgctgtgcatagttcttaaaggtcatactggaatcagtcgcaccagagataacatcaatagcgccaacgttggttccattcttttggaaggacttgttcaattctgggatgtattccttcgggccaactttaaccttagccttcattgccttttcataagcggcatcctttgtcttggacttgccgtctttgtcgacgtaatcatatttagtagaagtaatcttgccatctttaacggtcatcgccatttgtactttatagccatgatcatagccggtttcatccaacttataggtgccatctttcagtgcaccgccagcaacctgtttctgtgatgatgatttcttaaccactttgctgctagatgctttactgcttgttgaatttttactgctggaactactgctgccacatgcacttaaaactaaagcagacagtgcaacaacggctgtccccgtcacaactttacttaacttcatgacatttaccccttttgcagttagttactgcgatattgtgttttcaatcacataattagtttagctagtcacttagaaaaaatcaacttattacgggtattataagcgctttctcattttctaatatcgcgacgtagaccggatttctgtgtttttttacacaaaaatgttcggatttagaaaaagacgtccggaacgttagacattaagtaaaattaaaggctataatggcttagacacatacttgtgaatagtatggtaaagcaaatggtaaggagtgttatgcatggcgaaaaccaatatcgtcgtggttggcgcggggtttgccggggtatatgcgacaaagcacctggccaagcactacaaacgcaataaagacgtgacgatcacgctgatcgatcgccactcgtacttcacctatgtcactgagctgcatgaaatcgcagcggatcgtgttccggaagatgcgattcaatatgatttgcagcgcctgttcaaccggcgtaagaacgtcaaggttgtgacagacaacgtgacaggcattgatcgtgataagaaagaagttgtcacggaaaatggcagcttcccttatgattacgtgatcttaggcatcggttcgcagccaaatgactttggcacaccgggcgttgccgaacacggtttcactttgggtaagtgggaagacgcgattcggctgaagcggcacattgaagatgtcgttcgccgcggttctgaggaacacgatccagcaaaacgcaaggcattgttgtccattgtgattgttggttccggttttactgggacagaaacaatcggtgaactgcgtgactggcgcgacacactggcaaaacagtacaaacttgatccaaatgaaatccaattcagcttgatggaaatggctccgaccattatgaacatgatggatcgttcagatgccgataaagctgaacgttatatggaaaagcgtggcatcaaggtcatgaagaacactggcgttgtcggtgttcatgaagaccatgttgatttgaaagacggctcaactttcccaacctgcaccttggtatggacggctggggttaaggcaactgaccaagcgaaggacttcggtttgaagcaaggccgggctggccggatcttagtaaagaacaacatggaatcccaagacgatccaagcatttatgttgttggggatgtttccttagttgatcaagacggtactggcaaaggccaaccgcaaattgttcaaggtgctgaagccactgcgctgactgctttgaccaatattgaagctaagcttgaaaacaaagaacaagttgaatacaaagcgaactattctggcttcatggtcagtctcggttctatgtatggcgttgctaacatcatggggtggctccatctttccggcttctttgcgatgttgatgaagcatttggtcaacatgctctacttcatccaagtttattccggttattatttattccagtacttcatgcacgaattcttccggacacgtaacggccgtaacatgttccgcggccatctgtctcggcaaggtaacgttttgtggacacttcctgcccgcctcacgttgggtgccatgtggttgattgattgctggccaaagattcaaggcaaggaatcatggttcattgataaactgcgtctgccgttcacgtggctgcagccagccgcaaccagtggtgcttctgctgctggcgccgacgcaaccagtgcagcaaccggcgctgctgccggtgcagcaaaggcaacgaagactgtcttctcactgtcctatcagtatggaaacgatccaatgatggtctttgaaaagatgccaaactggtactacagtatcaccaaggcattgattccaaatcagcaagtcgccttctttatgcaaaaagccatgaccatcatggaaatcttgattggccttgcattggttgccggcctgttcacatggttgacctctgcagcgactatcgcctttgtcggtgtcttctgcttaagcggtatgttctactgggttaacatctggatgattccaatggcgttcgcctgcatgaatggttctggccgggcatttgggcttgataagtgggttgtcccttatctccagaaagtcttcggtaaatggcgttacggcacaccgcgatccttgtacggtaccgacacgcttaaataactgtctacacaaaaggctctgggtggacttacctagagtcttttttcaagagcgggaagctgttgtgaccatcttttccggccatagctgctccccgtccttcgtgttcaggcgtagcataaactgcatgccatgaacatgaacttatccagcggtttagattggagcaccagcatgaaacagcccagcacattcaaacgttatctcaaaatgattcggcctttcgattggatcatcgttggcggtctgttccttgcggccttcattccttatgtcatctttgcggtacacgagaatcagcagcaacaagctgaaccacaacgtgtgctcacagctgtcgtcacgcatgacggccatgaggtttaccgcaaacgactgactggccataccggcaccagtcgtttcacctaccgcgctaaagacggcgattggaacaaaatcgaagttaaagatgcaggtgtcgcaatcacagaagctaactgtcaagatcaggtctgtgtccggcgcggacgcatcaccaagcctgggcaaaccatcgtctgcttgccgcataaactgctcatcgaaattaaagcaaacaaaggcggcggaagtacagggggtatggtgactgaatgagcacgtataaagctgaccgtacccgacaatatatttatattgccctactctgcgcccaaggggtcattattggcctccttgaacgcatgattccgttcccgttcgcctttgcacctggggccaaactaggcttagcaaacctgattaccatcatttctctgtttacgatgtcgatccccgacagttttatcctaatgtgtctacgtctcttgctcaccaccctacttggcggcacgctttcaacattcctttacagcggcgctggtgccgtcttgtcttggtttggcatgctgttcatcaaacaattaggtgaaaaacgcgtcagcatgatcggcatctcggcagccggcggcattttgcacaatgttggccagcttttagtggcatcgttgatcgcccaaagctggactgtcatgctttatctgccggtacttgcttttatgggcatccttgctggcatcgcagtcggcatcgcagccaactttctttttgaacacatcgatatcttgcggcgactgcgctacgaccgaaccaagcgccgcaaaaaaggagctacacatgaaaattcatcccatgtggcatgaatacccaacgttagcgccggagctggcttcagcgctagccatgatcgaaaaacagatcacgaccaacaacacaccggtcgccaaggcaatcatggagatgatcaatggcggcggcaaactgttgcgtcccgcttactgtctgcttttttcacggtttcaagacgttgatcgcgagaagatgatcgccttggcagcggccattgaaaccctgcacacagcgaccttgattcacgatgacatcattgacaaatcgcccacccgccgcaatcaggtcaccatccagaagcaattcggaccagacacagcggtctatgccggcgactaccttttcgttgtctgcttcaagttactgtcgcattatgcgtcaagcttacgcagcattcagcaagacagcggcagcatggaaaagattcttaaaggtgaactggatcaaatggccactcgctaccaaaccaagattaccatcgacgactatcttaaacaggtttccggtaagactggccaacttttcgccctcagttgcttcatcggtgcctacgaaagcggcagcagtcccacctttgctaaaaacgctgaaaaaatcggcatgaacattgggattgctttccaactactagatgacatcctcgactacaccagtgatgacgacactctcggtaaaccagtgtgcgaagatgttcgcagtggcgtctactctgcaccattgatcctggccatgcaacgcaatcggcaagctttcttgccactgctagcaaaaaaagatcagatcaccgatgcggaaatgaatgaactgcgccagctcgtcatccaccatcaaggcgttgagcaagcttacgccatggcccagaaacgaactgaacagaccatcgccggtttgcaaaaactaccagcaggcgctgcgcaggatgatttgattcgcttgacgcagagcttgttgaatcggaaagcttaattgaactggcgtgatcgtagctgatggatcgtaattcctgtactggactcgtgactcattagaatccgcgtaatctagtaaaggtctaaactatagaatcctttgccgtgccaaactccgcaatctccggccagatggtgctggaacgctgtgacggcgcttcgagcccaaagcccggtctcgaagtcgcctaacaacatcagctccaagcccggtcgctgtgttgtttgcacggctgagccccatctggcctacgattgctccgccttggcactgacgtctttaaagctgtcttagtaatttaaatttatccatgcagaaacaaaaaaggcacagccaaaagtagttgctctttgctagcagcatacttttgactgtgcctttttaattttgttggatgaatggctcgccgtcagccattttccccatacttaagataaagctctccgccattgatcacttatccaaacagtggctggcagcgcgatcacatacacgaccaaatcaaatgaggtaaagtgcgtgtcatagaacgtaaaaagataaacgcttgttaccccaagtaatattagtttgtgctgccaaaaccatcgaagggttttcttcatgagtgaacctcattttgactgtctgactcgctctggttatctatgaaaccggtaaccatcaccgtttgacattattgattgtcgccgtcgtgcttttctcgttgtgccataaaataggtgtaagcaacctgtaacgcccagataatggttagaaatacagccaagatcaccgttatgaaaacactgcctgatgtccatgcaatcaatgcaatggccagcaccccaaaaggaaacatccacaaggtccgacgaagcttgccactataactcatcgcccagtaattgaagcctcgatccttatttttattttccactagtgaaccccctctcgctgaaaagatcggttacaaataagagcttttgctaaaatttgctctcagcatagcatgattgatttttacagacaacttttgatttacactagtagcaaaaagacaagacgcctcagccttcaataggccgtatgccttgcctttatggtagattgtaaaattaatccgaacgctgttcggacaaaaaagatcagcttcctttaaaatggtgtttaccacaaacccatcttttaggagctgatcttttgtctagtataacctattccgaacgaattaaaatcgaaaccttttgtgaactagggctgtccaatatccaaatgggcgttcggctgaaccgatcaccgtcaacaatttcttatgaattatctcgatgtcaaccttatcaggctgaattagcacaaacagatgccgaatacaagcgatcacgatgtggtcggaaaactaagctgagcgatgagttaaagcaaaaaattctcaaccatttacgtctaagctggtcaccaggaatgattgctcacgaatttaaactagctactaaatctatttataattggctaaatcaggggagaattggtttctccttgaatgatctacctgaacatggcgtacgccaacggcgtaacgttgaccaacgatccaaatataatcaatctttggggcgatcaattgaacagcgtcccatgatgattaatcaacgtaatcgcatcggcgattttgaactagatacagtcgttggtcctcgtgggcatagtaaggcagttttattaactttaatcgatcgaaaatcacggttcctttgggcataccggttaaaagatcggacgacagcgactgttaatgaagcactaactaagttcctaaccacttttaatggtccggtgcacagctttactgtggaccgtggcactgagtttagtgggctagtatcacttgaatcacaatatggtattaaggcctattactgccatgcttatacgccagctgaacgtggtagtaatgaacgctttaatcggaatttacgttatttttatcctaaagggactcgttttgagcacattagtgctcaagatttaacgacgacgttactccaaattaaccagcgaccgcttaaaatactcgactggcaaacaccgtatcaggttatgctgacaaatttgtccctcaattttcaagtcaagtgcaacgatgataacgaattcttgatagtggtctaggctgttacgccatgcatcggtagtaatcgcatgggcgaagatagttcagaatacgtctgggacgatggttcagtgcggattggactgcttgaatttcaaccagggtaactgctctgagagacttccctttcgggaagaattccctaagcagtccattggcgttctcgtttgtgccacgctcccaaggcgagtacggatgtgcgaagtaaatctgggttccaacaatctctgataacttggcaaactcggaaccattgtcaaaagtgatactctcaaattccttggccccgtagtcgtcgatcgtgtcctgcaaggctttaaggcaggtgcccgcatgatagtcaggaatcttgacgatgatctcagtccggctgtaccgttctgtgagcgtcattaatgctggctcatcagctaagcgaatacctttgaccaagtcgccttcccaatgtcccacgcctgtgcggtcattcacggccgcaggacgcaactcgattgagtcgccgtatatcttcttattcttgcgcttgtgggcgttcttatagcctttgatgcggcgtcggagcttcttgggaagtgtcatgttgtctagctcaagcagcccggcgtcgatgtagcgatacacagttgtcgttgaagggcaagccttgccctggtcgcgatagaagtgtacgaagctatcaacgctgtgtacgcgcggcttacgagtaagctccctggcgagagccttgaagaacgcacggccggtcttaagaaaggcgtagtgaccggttctatcgcgtttacggtcgtgcatggcttgggcagtttccgcaagatagacttgatgcgagtgacgcttcgagtcgagctgagttacagatccacgcgtgatttctcgtgagattgtcgctttactgcgatgaagcttctgtgcaatcacggtcgcggtgtcaccagcagcctgaagggcctgaattgtagcacggtcgctaaaactgagttgttggtaatgcttgtgggtgttagtctgagagtgggtcatgaagattcctgctttcttgtttagctagcactaacaagaataggtcttcatggcctttatggtctagtcgtcagggtgttgcacttgaattgtaaactggggctgacaaatttgtccaaaaattcggattaaatttgcaatctaccttataacaattccatcacttatgggtctgcgctgcaacttgcttaccaaactcggtttgatcaaaatgatcgatgatgtccttaagctcagcgtatcgcagactcgcgccgaacagtgggctgcctggttcggtcatgatgccgtctgctaagttattgtgcacaacggtatcaaatcccatatgatcgacaaaagctgccacagtggcgactgcctctggatcgttgccggtcacaaataatgctttgcgtttaggatcgcctttgggccgcgcctcttcttgcaaattgtgatagcccatatgattgaatgccttgacgatcttggcatctttgaaataggtctgaacttgttcactggaagtcgtacttgggtctaagacttcttcgcgaatgccatctgtttcccaccagtagttcatcgcatcaattaccaacttgcccttcaacaagtcggcatcaatgttcttgtaacgactgagtggaattgctaacaagataatgtcactgttagcgacaacatcagcattttcggacgcaattgcgccaggaacgagtgttttaatggttaaggcaatttttttgactgatcccgaaccggaaatacgtactgtatagccggcatctaaagctagaccggcaaggacaatgccgacttttccggcaccgatgataccgacgcgttgaatagccatcatttcaccgccgccttttctgccagaatttccttgacccgcggaatgactttcgtgccatatagctcaatcattcgttcgcgttgtgccgccgtttgattaccagccccgtaaacaagatcaaaccggccgagatcaagcaagtcaatggtcgccgccatgcgtcgggccacggtctctggatcgcccacgtagaaagagccgactttggtttcgccttcaaactgttcacgactcatcagcgcccacccacgcgttaagccaatacgatcaaaattggctttgatatttttaaacgcaacttcaacggcttcgtcttcgtcatcggcaatgaagccgtgggaatggacggcaatcggaaattccggtttgttgagttccttggccgccgcgtgatataactcgatatacggcttgaactggctcgcctgaccaccgatgattgcgatgatcactttgtagccaaaattgacggcacgaatcaccgattccggcgaaccgccgatgccaatgtaagtttcgagtttggcgttttcggttttaggatagacttcctgatttttcaaagcagctcggaatttgcccgaccaagtaaccgccttttcattgcgcaaagcatcatacaaccccagtttctcgttgaacaagtcgtcataatcggttaaatcatagccaaataacgggaaggattcagtaaatgaaccccggcccaacatgacttgtgctcgcccattggacagtgcatccaaggtcgcaaatcgctcataaactcgtacaggatcatctgaactcagcacagtcactgctgttgcaagtttaacctgtttggtgaccgccgaaatagccgccaaaaccgtttccgggcttgacacactataatctggtcgatgatgctcaccaacaccaaaaacatcaatgcccaagtcgtcggccagcttcccctcgcgcacaatttgccgaatagacgctgctgcagtttgcaagctgccgtcttcatttgccacgatgtcaccaaaagtttccagtccaaattgtaaatgctcaatgtctaccatcgaaaagcctcccaaccgataatgcttactttttgtaagttgatgatattatcataggcttttttaaggtgcatggcaaccttttagagggtaaccagtcacacgatcaaatataggattaagccggctatagaaaagtgacttccaagttgaggagaagcctgcagtcaccaaagcaatgcgaaccaatacatcccattaataccggcattttctcgtttgatagatctcacctgcgatactactgttagcgtcttgtcatcaacaagaaggcaacaaccctaaacacgaatataccggcctactggttacgtttctggctccccaaatgatattgagagcgcgctcacaagacacacttaccgtctctctgcggtatgcgtttcgaatgcttcagatatcgagtttgactctatcttcacaagtcgttcatttcgtgatagcttattgattaaccaagcagtcttccattgatcacaacgaaggagcaaattcatgaatctacctcaacggcaacatggatttttgttgacccccaatgctaatctgcacatgcgtcccttaacatactgtcttttaagtacacttctattcgtacttccctttagtgccttcatgaatatgctcatctcctacaaaagactttgggcagttctttcagttgtcgtcatatgtctcatgatcttctttgccagcattattacagtcatttcaaacgccaaaaaagagactttgccaagcctctttaaaacaaaacggcgatggttaatccaattactaggagcccttgtagaagctgcttcatttctcttcataaaatttttaactagccaatgaagcatccccttgtacaagatcaatattgaatggctgaaattgctggaccttgatcccgaaagtttgttgactactaatgtttgattgcaaaaaaaagacccagtaacttctcttgttctgctcatcctggcaggacaaaactgaagtccactgtgcctttttttaatgtcatcaaatttgagaaggctgggtcatccccataactactctttcggcttcggccgccgctccaaatgccggcgcattttgtctagcaagaatagctggtcgttattccacggactgttgcgtcgggcgagatgggcggcgtaatttgctgtgtcgtggttgaattctcgatcagagcgctggacttctttgagaaaatcgcgcgagctgatccgcaaggcgccacgagagaagacggtccattgttcagcttgatcgctagtaacgacgacaagctgcactagcggcgagttcatgtcctgtgcgaggcgttcaatgtaactatcagcggtttcatcttctttggtgaagacgacttgcagatcccattttgcataacttttaccaataccgggcacgtacatcgcatcaaagaccacgatcattttagcgttttcgtggctgcgatattctgccagaatgtccaacaagcgatcacgggccacatcaaaatgatcctcagctttgagttttgcaagttccggccagttgccgatgacgttataaccgtcgacgatcatgatgtgttcgcgcatttattttccctcatgccgactggcgaatgcctgatacatcaggatgcccgcggccacacttgcatttagactttgaacgtggccgaccatcggaatcgcaatcgtcgcatccattaacttcgcaatgccaggcgagatgcccttgccttcattgccgagcaccaacgcagtactgccttttgcatcccattttcgataatcctgaccgtccatggcagtgccaaagacccacatgccgcgttctttcagcgtcttaatggtctgggcgagattcgtcacccgtgccaccggtacatactcaatcgcccctgtgctgactttggcaacggcacttgtcaggcccacagcgcgatgcttcggaatgatcaccccgtgcaccccgcttgcatctgctgtccgtaaaatggagcccaagttgtgcggatcttccaaattatccagcaataggaaaaacggatcttcgcctttatcagcggcatttttgaaaagatcatctaaggttgcataagcgtaaggcgtcattgccaataagaccccttggtgattgccttggtcactcatcagatctaatttttgcttaggtgccgtgctcactaaaatcttcttcttttgcgccatgccgaccaaatgctgaatcggttcacttttcaggtcggtttggacgaacaatttgttgatggtggcagcggtgccagctttcagcgccgcctcaacggcatggcggccaaagataaactcatctggatcatgttcagttgttgcttgcggcttttttgccatgtcccgtcttcccttcttcaacgtattggatacaccatgctgctaattcagcaacacggtcatcgcggccgatcaaatgtaagtagccgaacagtgcctcgaatcctgttgaaactcgataagtcaccacatcggtatttttcgcgtgcgtgtagcttttggcattgcgcccatgcttgaaaatgtcggtttcgtcgctatccagcaggttggcttcctccatcccggcaatcagcgccgcttgtgcctttgcggacacaaaatccttggctgcccgttgcagtgatgccggccgaactaaaccgcgcttgagtaagtgttcccgaatataaacttcataaaccgcgtcgcccatgtaggctaacgcgataccgttcaattgttttggatcaaatgtcattgtctgcgccaccgtgttccttgaggagtgtcttccaaaataatgccttgtgcggccaactgatcacgaatttggtcgctcttagcaaagtctttcgctgcccgtgccgcatctcgagccttcaccaaggcatcaatgtctgcatccaggttcttctgatcagcaaacaccacaccgaagatttgcagccaagcatcgtattcattcaaaaggtcattgatactttcacttttgaccgtctcttcattagcatattcattaagcaactttgccagatcgaataaaacggtgaggccattttgaacgttgatatcatcatccatagcagtcacgaagcgatccttcaaggtttgcagctgcttggtaatttgtggatcaacgccggtttcggccccacgacgacgataggtcaaattctcacgagcaatttttagccgattgagactgttggccgcatttttgaggttagtttcagaatagcgaatcggcatccgatattgggtacccgccatgaaaaaacgtagaacttgcggatcaactgttttgcgaatatcgtgcacagtgatgaagttgccaagcgatttgctcattttctcgtcgtcttcaccaatcgtcacgaagccgttatgcatccaataccgaacgaactgcttgtcggttttagcttcgctttgggcgatttcattctcatgatgcggaaattccagatcctggccgccaccgtgaatgtcaaaagtatcgcctaacagcttggtgctcatgactgagcattcaatgtgccatcctggccgtcctttgccccatggtgactcccaactgatctcaccgggtttggcggctttccacaaagcaaaatcaatcggatcttcttttttagctaattcgtcttgggtaatatgttgactggcaccttcttcaagttcatccacattctgatgagataactccccataatgtttaaacttgcgggcccggtaataaacatcgccgtcaacagcataagcgtattctttgtcgatcaaatcctgcacaaaatcaataatatccgggatcatttgactggcgcgaggatgagccgttgccggttcgatccccagcgccgtcgtgtcttccatgaacgcatcaataaaccgttgcgccaagtccagcggagcttcaccggttttatgagcagcattgataatcttgtcatcaacatcggtgaagttcgaaacataggttactttatatccgcgatattcaaaataccggcggatggtatcaaacgcgatagcactgcgcgcgttaccgatgtggatgtaattgtaaacagtcgggccgcagacatacatccggatttctcccgggtgcaacggcgtgaatgtctcttttttccgggacattgtattgtataacgttaacatcggctcatttccttcctgtagcgtcttaactgcattttacaggaaacgaccgtgattataaaggaacggggcgggcgattgcaacattctgtgccgtgccaaacgccgcaatctccgccttggcactacgaccttaatgcttagcagactatctatcaaaaaataaaaaggaatgattttcctaaatacggcaatcattccttttggagctgcgcatgacgttcctgtttttcagcagccttaatcaattttccgcttcggattcagaatccccaacggatcaaacaatcctttaatttgatgctgaatctcatcaacatcaaagcctaattcttcattgttccattggttcttgctcatccccaccgcatgttcaccggaaatggtgccgccgagtgccaatgctttgcggaacatcagacgaatggcttggagcgcttctttgggcggttcttcctcatcagccggccagatgacggttggatgcacattaccatcgcccgcatgacctgccgtgtaaatttcgacatttaagtcctgtgcgactgacgcaatatagtccatcatttcgggcagtttagacaacggcaccgccatgtcttccataatatgttggccgttagcgaaaaccgccggcaacatgtcctggcgtaacttgataatcgccgctgcttctttgggatcactggtgaccttgatgtttttggcatgatcgtcatttaaaatctgctccgccattttcagactagcttcaccaccagcatctaaccggaacaggagcattgcctcggcgccttcagcatagtgagtgccttcataacgatccaacgcagcaactgtcagaccatcaagtgcttcaagcatgaccggatagataccggaaagccgcaaatcctccacccctttagccaatgctgtcatgttgtcaaaataagcaattccaacaaccggcgtgccaattggaatcgggttcagtttgacagtgacttcagtgatgatgcccaatgtgccttccgagccgacgaataagtgcgtcaaatcgtaactaaacgcatgcttgtaagttcggccgccaagtttgatttcacggccgtctgccaaaacaactttaaggccaagtacattgtcggttgtcgccccatacttcacggtactcatcccaccagcattggttgccgcattgccaccaatgcttgaaattggcttagatccaggatcaggtgcgtaaaaaagaccttgcgcacgcgctgccttatccaggtccccgttgatcacaccaggctcaaccactgccaacagatcgcctttgctaatctctttaatccgattcattcgcgctgtcgacaaaataagactgccgtttatgccgtcagaaccgatcacggtgctcgtatctgcgctttggggaaccactggcatatgatattgacgcgcgattcttaacacaccttgaatatctgcaacatcactgactgcaacatatgccagaattttcccggcaatctcacgctgggcattgccattggcgctatgttcgcgcgcaattttatcatcaatgtggatttcggcatgcggggccgcgtcttgcaaggctgccagaatttccgagttatcataagctgtaaaaattgccatcacaaaaacctcctcaacacctctaaaggcaggtggcagcgttggccattcgcctctgaagcgtcgactttattatggactattttggtaaagatggcttagtaagacgctcggtggtgtgcctattaagacgccgattgaccctgcgatgagattgactgtcttgcctttgtctcaacagcaatggtttccttgggatgaacggtaataacagcctctcctagccaagtcgtttctggtgccatggctgccaagcgataaggttgacgtggttggccgctgcctgttattggcgttggtgtggcaacacaaatcgtcaagacatctgtgtccacaccagcgtctgctaaatggcgaaagcggaccaaattaatggtctgttcttgtggtaccaccagtggttcgcagttgccgcgataatcgagtcgaacgacatgccggccatgtgtgtcaaaaccagataaaacggccacctttggacgaccaaggacttgagttcgcggatcaaaaccgtcaaagctggcgaaacgcggcaatatgtaatagaagatcggtgacgccagggccacaggttccttgcttagtaaatgcaggccgactttcccgccaaaacagccggctgcagctgatcccggcaaatattgcaaggcaaaagttggttttgtggtcaatgtgtctaacggttccttgtcgttattgcgattgtcacgcatcagtggtcactcctgtcaaaattatgcttgatataattaaaatgatactcgcttgatccataaaaacgcacgttataagatttaccgaatttttgctgacgattcaatccgagccattgggccagattctccaagtaagcctgaaaaagcgcgtctgtgttgcggttatcaaaaaacaggtgtttgttcacggaccatcgtcggtcctgaacaaacacctgcagttgtgaaaaatcacaacatgaactcaacattaggaagacaacgacgaaaaccagaaaaacatgcgctgtccattaatcatgccggggattggcatatcaggtcaatgaaaaagccaggcataaatgatatgaaaaatcgctgccgtcaccagtcctgtcatcatacccagaacaaaatataaaagtaagtgctgccgcttacctttcatttttcattcctacccttcctacgttgcaaggagctattctccctgtcatttagggtaaccgatgtcgacaagttctggggaaaataaatataaacgttaggaaatcaccgattaacgtcgtcctttaggcacaatcactcaattattaacaacaaacgttgcccttcgcgttccaccaaaacctattgtttgcatgcaaaaacccgcacatctgcgcgggcttcctgcatcaattaaagttggccggtgacaagatcaacgtttttaaggacttgatcgcgacccatcagttcaatggtttcagcaagttgcggaccatgcatccgcaatgttgcagcgattcgaattggcatgtaaagcttgcggcccttgaccttggtttcctgcttgacttcattgacaataccgccaatggaataagcgtcaaacgtgtcgagtgcccgaatctttttggcgaaggcttcgatgactggcttagcattgtcatctgccagttctttgcgttcgtcatcggttaggtcagtggctttgtcgaagaaaatatcggcaagcttgctgatctgagcagtgtaactcatttgatcggtgtaaagactaataagctggcgcgcccactcgatggtcttcggatctggatcactatgaattttgccatcttcaatcaagttagctaaggacaaactcatcaattcattcgggttcgtcttttgcttggccttgatgtattggttgttcacccattccaatttcttctggtcaaaacgggctgggctcttagatagccgctttggatcgaattgcttgatgaattcctttttggtgaaaatttcatcttcaccaactggggaccagccaaggagcgtaatgaagttgaacatcgcgtctggcaaatagccgagttcacgatattgttcaatgaactgtaacacggtttcatcacgcttcgacaacttcttaccggtggcgccattgatgatcaaggtcatatggccaaaaattggtggttcccagccaaatgcatcgtaaatggccaattgcttcggtgtgttggcaatatgatcgtccccacgcaacacgtggctgatttgcatcatatgatcgtctactaccaccgcaaaattgtacgttggcatgccatcacgcttttgaatgacaaaatcgccgcccagtgtgttggcatcaatcgagattttccccttaacgatgtcgtcccactcgtaggtcttgtccattggaatgtggaaccgaatcacaggctccaagcccttcgctttggctgcggcaatcgcgtcagctttttcagcgtccgtcatgccctcatattcatattcgtaatgcggcatctcgtgacgagccttttgggcttcacgatcggctttcagttcctcttcggtccgataagactcgtaggcaaagcctttatcaacaagttgcttgatcagcttgtcatagatgtccttacgttcagactgccggtatgggccaaagtcgccgcctttgtcggggccttcatcccagtcaatcccgagccagtgaaggttctccatctgactcttttcgccgtctgcaacattccgctttgtatcggtgtcttcgatccgcagcaccaacgttccgttgttgtgccgtgcgaacaaataattgaacaacgccgtccgcgcattgccgatatgcaaatgcccggtcggacttggtgcataacgcacccgaattggtcgatctgccaatgtcttagcctccatttttctgtaaacatgcactgatagtgtaccacagaagggacgttcattgggctgatgtgggagattgaatctatgtcagttggcttctgatcgttctactaaacgacgcaacctttgcaatctatcattgccttaatcaaacgggaatctcatgccccatgcatttcgcacactgtccatgatatggctgacatcgtgagatagtagcaactgaccgtcatcgtgaccttcatcaatgtagcgctgaaaatcacggacttcataaactaaggcatcggcctgatcacctgcgcttaatacctcgctggtcgtggtatgggcatcaggggtgtaggttactttggcggttgtggcacgcggatagtcatcaatttcaacgtagccttttgtacctgagatcacgccgcgttttggctgcttagcgcgtaatgacagtgccatgacggccaactgctgatcagcattttttaaaatgatccctgattgttcatcaacaccggtttcaaagtacttgacggtggtgagcgttacattgggctgagcatctaagaacgtacgagcaaaggcagttgcgtatccgccgatatcaagcaacgcgccaccagccagatccttattgaagaaacgattctttggatcaaagtctttcaagctaccgaagttaacttgaacaagatgaatgtcgcctaacttgccacttgcaatcagctgcttgacttgttgataaaccggcatatggtacaaggttaacccttcagatagaatcaggcccttgtgcttggccaactgctggacatcatcaaattgcttagcattgaccgtaatcgctttttcggcaagaacgtgtttgccggcattcaaagcttttttgatgtatggataatgataggtatgcggcgttgcaatataaatcacatcaacgtttgggtcggcaatcaaggcatctggatctgtatatgttttggcaatatgtttttcaatagcgaacttcttaagcatgtcggcattgacatcagcgacggcgtagatgctaccgttttcccggtttaaagcgtcggccatttcatgtgcgatccaaccagttccgatcataccccagttatagtttgtcatatgactcatcctttcttttaaacgcattctccagcccagaaacctgcgtgtaagaaccttggtcgcaatagtcagagtccgaccatcacgcctaaggtcacttacactccggtttctaaccgggctggttcacgctctgcttaatttcatgtacctgaccatctggtgtttctattaagagtaatgtcgctaagtgagcaaagtatgacgtcgcaacaactcccggtaatgaggctagcaaatgatcaacttttgcgatatccgtccattccgccatcttacaatcaattaattcattgccgtcgcgcgttcgcgtgtagcccatgtaagtggtagccacccgtcgttttgcctgcaagcctagcagcttggcagatgccatcacctgttcacttgccgcgctaacaacttccaatgtcagcggtaccgcggcattcagttgagcgttgacatttttctgagcagtgagaatcacataagcatggctcgcctgcgcgtgcaacttttcataaaaatgaatgccgccattacttttaagtaaatttaagtccttatcggcactgtcacagccatcaaaggcaatatcactagctatctgtgttgttgttggtaaccccagtatctgacaataagccagcgttacttcagagggactgcaaatctgaatacccggcaatacccgcgcgacaatgccatcagcaagagcctgcatgtgccgaccaccgccaagactcactacctgatgcggctgaataagtgctagagcagcggcgatttgttctgtcatgaaagttgcttcctctcttttatttttgatgaaattatatttcacatataatgtaagactgaaatttagttttgtcaacagctagttgtgaggattgtcttttgaaattaatcgcgtagaataaaggccggagagtttcataaaacagattatttagaaatttagttgaaaaggagctgtgttatgagtattattgaccgtctttatagcatgctgccaacactgaccgcgactgaccgtaagattgcgcaggttattctgacgaatcccggtgctgtcgtgaataccaccatcgccgccctcgcaaaagaaagtaacgttagcgaagcctcaatttctcgtttttgccggacaattggtgttgaaggctttcatcaactcaagattgagcttgctaaggttgctgaaaaccgtagtgcgtattatcaggaaattaacgccgacaatcttcagcaagccttaagcaatatcagtgccaacaaagtcgccgaaatcgaaggcacactaaaaaacgccagctcacatgacattcgaaaaattttggatttgttaaaacaagctagtgtaattttagtagccgctgctggcgatacgcagccggttgccgatgatgccgtctataaattcaatcaactcggtctactagccatcacagacagttcttgggaaacggcgctcgcccaaaccatgaatgcaccagcagatgctttgttgctggttatctcaaattctggcgaaacgcgcaatctcatcacccaaatcaaagccgctcaccaacgtggtattgctgtggtcgcgattaccaatcgcaaggattcaccgattggcctagccgccgattatcagcttttgaccgcggttcggcagcaaattttcgagtccgaatatttcttctcacgcgtagccgccatgacggcggtggaagccttattcttgttgcttctagctgaggataaaactttcatggcacatattaaggctcatgaagcattgattgcggagactaagatttaagtattcgtcttaggccgactcttatcattcaaaaatgccatttctcctaagaaaagaggggtgatttttccgcagcacagaaaaatcatccctctttatttgcaagtattaagtatgtttcaaccttaactaggaaaagtctgcaactatgccgtcttcgccgttctcgtcatcacctgacgattttgacgccagaaccaatacgtaaaggccaagactaaaattgtctgaacaactagtaggacttcttcaaccgcaccgttcagcgcaccaacctgcgtcagtgccgccggaaagtcgataaaggcatgtaagccgattggcaacaatagccagaaccagcgcatgcgtttcataatgatgatccacacaaccacggataatgcgatctgaaccgccaaggcgagtagtcgttccatcaaggataacgaaatcgtccagcccgtcgttgccatcaattgtttcacttgcgtattgagcaccgaacgcgagctagcgggtaccttttcaagcatttcgtttactttgccgccattaatcagcattgcaaacataaagttgctgaacatggtcaggctgccaatcagaatcatttcaagcccgccatgacctaatccgtataggaatggtgtttcgggtgtcgccgccttggttggtatgcgtttattaataaacttaagtcctagataacggccaacctcttcaaaaacaccagctaacagcgcgccatacaacgcatatagaaacggcacatgttggaaatctttagcgatgccgcggaagggtccttccaatacaccagcgaacaggaaaaaaacgcccatgccaataaagaaaaccttaacagcacctttttggggcttgctgtaacgcagaatcacccagattaacaaaataatcggtaaggcaaaacaaagtagcatctcaacgcccatcatgttaaccgtgaattggctgacagggctgttattcacaactttatccattctgaacacccctcaatcaagtataaaagaaatgatgacaatacccgcgacgatcaatagaaaaccgacaaggatcacccaactcatcgttttggccatattgagcgtgaacccaatccccaaccgtttttcaacaaagagcgccggatcagttggattatagtaaaacatcccccagacccaatgctgattatcattcaacacagatcctttggccgtaagtcggcgagtccccagaatatacaccaacggcaaaaagctgacggagagcagtgtcagggttagtgtgatgatcacaaaccaccattgaccttcagctgacatattcggcagcatgagttggagaaccagtaagctttgactcagaaaacctgtgaacagcagataatacaaaacggaattgcgcaccttaccagctcgcggttcagcatccggattgccgcgaactgccccgcgcgctctgcgggaaagataaaaagcacccagcacagttagcgtttcaaccgccagcgccaaaattatgacccatgaatctgctgatgtttgctgaaaaccaagtacaagggctaaaaagaactgcggcaccaagacgagcccataggctgccggaaccagcgtttggggcttgagcttattcaggtcaacagtcaccttgctttgggtaagctcctgctgattccccatctctttaaggagttgcaaacttttccgatgtgccgccacaatcaaggcataattcagactgatcgaaagcaaaaaggcagcaatttgaatccaagcaagcgcagtcgccgcaaagtgcatggcggccgcaatcccaatgccaatcactgaaaggattgccgcccctgttaatgaaaaggcgagataacgacggcgtaattttttagctgctggcgttgtccaaatgctgttacgggcatatacaacgccgaataaaacatttcgccgtgacagccatggtgtgacaacctgaatcgcaaccaatatcaaccacgtaacaactaaaatcaccatttctgcttgcatctttaatcactccttcagatcatcataaagttcatcaatcatggtgtgcagtgcatcccgatctaaatgtcgggccactgcctccgcgacaaccttttctaaggcaggtcgcagcacctctgccactgcttgattcggggagccatgcgcgtgaacaacgacaccacgacctcgctggatctcaacaaaaccttccctttgtagttccttataggctttattcaccgtatgcagattaaccccaagttcattgcccagcgcgcggatagacggcaaaatagtgccattcgtcaagtccccagtggcaatgccactcacgatagcatcgcgaatctgcgtatacagcggaatcttagaatcgaaatcgattgtcagttgcacgtcttcaccttctaactgttctagttgttatagttagtatatagtggctgttgaactaggccaccatatcttcgacccttgtagtaaatttatagcgaatttgataggcctcaccctcgaatttagccaaaattaaaattggtatagcaaatacccttaacagggtcagcacattgctcaagacgatggccgcgtcaatcttgacggccagtgattcagctgtccgagtgttcaccaagccaagccccagcgtgcccttcataaaagcaaaccggcgttcaatggtacctcttcgattctcggcatcagtatcctcacgccgtttcgctgcatcaacgtgttttggatgccggccaagcttcggaccgcagattcggatacccaaatccttacacagctttaggttctcccgattacggtacagcgtatcggccagtacttcatccggataatgtccatgaaggtcgtaatagtggtctaaagtttccgcgaagtcttggccctcagagaatgcggtgaaatcaaaacgttcaatgtcgactacgccttcacttaacgaacagtcaatcttcgccccaaattcaactttagcattggccttaccacgttgaattgggcgaatgtacggctgttggagactaacaattcggtcttcaacgtggtgagtcttgtgggtatacatgtaccattgctggtcaaatagaattcgaatcacgcctaagcgaatcgcttgttcatctggtagagtcgcaccctgatcgatgaattcgttgatgtaccgcaaatcacggcgcacatattgaagttgggccttgacctgtttatgaaagccaccacgctgttgctttggatgtcgtgaaaatgaggtccaacaatgcttcgcctcgcgtttgtacatgcgtgggtttggcacaccaagttggtgtgccatatcgatcgccatcgcctcaagattcagccttgcttggttgaggaggacggtgtcttgaggatacttgattttgactggcactgcggttgcgtccgtgatgacggtgtccactttgaatgggaccaacgcttcgatcttggcgcgtactgtatcattcatgatattcgtaatcagctcggagatatcggcaattcgtttgcgaaagtgtgccaggctggaataattaaacggctcaaccgctttgtattcggacaacccgatgaaatattgaagtgcgggtgtatcacgaattgccgcaaccaccccacgatcagttaaacccatccgttgttggatcaggattgccccatagagtaaacgaaatggttttgccgcacgtcccgcatttttggtgaactccaattggtatgcctcatcgagagctttccagggcatgacctccgccaactggacccactcattgttagagctaagtggggtacttaaaccggcaccaaaggattcaaatgacaattgaagcgggctgtgacgatagaccatacgataacctccgagtagcttcccaaaaaatgcaaggaaaatgcaggaaaacagctaattccaatggatttattataccgcaataatgcatatattagcttaactgcctgaattatagaatttttaagcagccactatataacgctgaacgctcacttagtcaacaattcacaactcaaaaggcgataaacgcacaaaaaaagtcccacgcaagaaatgtcatcgtgagattctttacaaactcttttttacagatcaataactacttttcccgacgacgcagtccaaatgatccaaaactgatcaaggcaagcagcaaagccaccccgatcgcaattaagccggtccgttggttatcaccggtattcggcaagtaacggcttatttgcttggttgggataataacttcgattggcgcggtgtcattatcggatagcggtgccgattctgtcggcgtatccgacatacttggcaaaacttgagttgacggtgttgttggtgttgatggcgtgactggcgttgatggggtcacaggtgtcgcttgctttgcgtaaacgaacgtcacggttagactgcctgttgcaaaagcaccattttccgcgatgctgccagatgctaatcgtaagtagtgataattcgcgatcatcgttggtgtaacagcatacggatcgccgacatgaccggtcagaatcttatcaggcgcaatctgcttgccattgtcatcgacatatttcacgtcaacagttccttgagcaactggattcttagtgtagatgaaggtgacggtttgcgtaccgtccgtaaatgaaccatcttccggcgcactgcctgtcgccaaacgagcaaattggtaattcgtcatatcaattggtcttgcttcgtaaggatcaccggcttgaccagtgagtattttatcagatgccaaccgtttgccgtctacgtcaacaaacttcacgttgacactgccacgcggaattggtgtcttcgtataaacaaaggtgaccgtctgtacgtcattggtgaaagtcccgtttgctggtgcgctgtctgtggctaattggggattttcataatagtcaaaggcaggtgctgtcatcgtataaggatcgccgactttgccagtgatcaccttatcaggtgccaacatattaccctctaaatcaacacacctgaccacgacggcattgccagttatgggtaaactacgattctgataaacatcggtgtctggcacagcgctcgttgtgtcatcgccagcgtctgtgacacccttagtcgaatattgatcggtttgatgaccggcaatgatctgggcattcacgccagtttcttgctgtttcaataccgttgcttgattagtcggcgttgttccagtcgcattggtgaccactgaatgaatatgcgatgtcgatgctgcaactgactggatttgactaccacccacacaaatccccacgccaatcaacgctgccacccatagcgtacccgctttatacatcttatgctgagacttttcgttactaaatgcctgcaatgattttgcccccttctcatgacccaagccgagacgcgctcaaccgaaaaaaacaaagtaaatattacatattggtgacaagtataacacttgacatttttctatgtagctccagcacaaaaagcctctttcaattgccgtattgcaattcaaaaaaagacttcatagaaccgagtctaaaagtctttatcaattaactaatatttcgagtgtttaaaaaccgtctacgtgccacaaagcaatgttctttagattgtttaaaacccaaacctgaagtcatgacaagtacgcatccgcaatccaaatgcttcttttatttagcgttcattacgatacttgaaaaccactagacttaaagccaaaaaggcagctgcataaatcagataaccaagactaatttgactaaggggcagccgcgtcaacttacttagttcagcgttctgcaattgattgcctaaattcatcatgttaaccggattccattttatccattcatgttgtttgatcatcataaacatcaactgattaaaaattgaaacaatgaagtatgtactgaggccaatgatgatagcgggcgttgagttttcaaacagcgttgcgagtagacaaacaaaactcaatatgaatatcagcgttaagaatgaagaaatgttgttcattaaccatatttgccaaacttgctgtccttttatgccctttgcgactaaatcaatcttgccattaaaaactgttattgcgagacataagctcattattaagctactggcatataaaacgagcgtgcatagcaatagcgtcacccacttgcttgccaagattttgcttgacgaatatcgacgataaagtaaggattttaaagtgccgtattggatttctgacgataactgcgtacttgttaacgcaagcatatagaaaacaatcaaaaccggcgcataaaaactgttgatgaataatgaactcgggttggaagcattggggtgggttaataagtacacggcaattgcaacttggaaaagggtaagaccgaaccagaaaacgaataatgaaggccttttgactagtttgtaactttcttgcttaactaaggtgaccaaaaaatgacgcctcctttttattttgttgatgccaaaacatccagtagagatttttctaagtctccttgcgtttcttttatatctttaatgacaatatctttgcgccataatagttttaacaggtcattaatgctagaaatggacgatcggctaatttttaaaccttgctcttcattactaaccacgtagccctgttccgctaacagtttctgagccagctcatcttgatcagtcgctatccaaaagtatgtttgacttttcttcaataactcactcatagtcgcatcaataattaaacgaccttgatcaataataatgacatcatcagcaactttttgcagttcactcaaaatatggcttgaaatgagaaaggtggtcccctcatcacgtttacggataatcaactgacgaagcgccatggtcgctttaggatccagcccattcatcggctcatctaaaatcaccagttctggacgattgacgaatgcaagtgcgattccaagcttttggcgcatacccagcgaatattttttggttttaacatccgcatatgctgcaagatgcaactcctcaatcgtttggttgacgcgttcatgccgctgaggaccattggcaaaaagaagcaattgttctcggcctgtcagataaggatacaaacctggatattcaataagtgcgcccacatgctctaaagcactatgattatccacggtgattttttgatcatccaattgaatatccccatcaaacgccgtgattcccaaaatggccttcatgatcgtggtttttccggcaccgtttgcaccaattaaaccaacaatatgaccgcgttttatctcaaaggaaatctgatgtaatacttgcttctttccaaagaacttatcgagctgatttattttcaacataccttgctgtcactgcccttccaatgcgctcaggcattttagactttaaaaatgctctatttggcatctttattatcctaaatttagcatactaaaattgcacaactgttgtttttggtaaaaaaggaactcaacttaagtaaattaaaagaaatatttcatctccgagaaccaatcattgattgactttgaggaaattcaaatgaatcagagattgaatcagttcccgaaaagcaaaaaaagaaggcagcttcagttcccgataagggatctgaagccgccttctttcatgacttaacagattatctctctttatcccgaattgccttttgctgatgcgctggctttgcgaagatcatgcgccctgcagccgtttgtaaggcactggtgacaatcacttctaacggtttgttcatgtagaacttgccgtcttcaacaacaaccatggtgccgtcttccagataggcgaccccttgctggcgctcagagccggatttgatgacggtgaccgtcatgccttcaccgggaatgacatctggtttcagcgcattggctaaagcgttgatgttgagtactggcacattttggaactgggctactttgttaaggttaaagtcattcgtcataacgatgccatccagcaatttagcgagcttaagcagcttgctgtcgacttcggtcatatcttcgaaatcgccttcatacatctcaatatgaatgtctttatccttttgcatggcattgagaatatccaatcctcggcgaccacgcattcttttcatggaatctgcggagtcggagattagctgaagctcatgcaaaacaaaattgggcacgagcatggtgccttcgataaaaccggttttggcgatggcctgaacacgaccatcaatgatcacactggtatccagcaacttgtacttgcggaaatgatcgccgactttacgttctaacacctgatcattttccgtatctgcagttcggcggttacggaaactcaaaagccgccgccattcttcgctgcgtgtcgtacccacccgaaaacccaagtaaccgaataatagcatgatgatgagtggtaggaagatattcagcggtgcaacgaagccatagaacggaattgaaataattgccgccaagatcaagccgataatcgtggataagctgccgaacaacaagtagcttggcgactttgtgttcagtgtcttctccaacactttcaaccgacctagaatccaaccaacgctgaggcttgccaacagcaggaaaacaacgccgccaatcaagccgtcaattaacagattgttcagaaaatggttgtctgcccagccgatcaaatcccaaagcggcggcaaggtgcccatcccgaccccaatgccaatcaggccgaagatgatatagataattcgtttcttcataaaatgaccccctttcttagtttaattaaagaccttatgcagcgcttcggcaatgcttgtaacaccaatgacttgaatatcttttggcgcatgccagccttgcaagttgttacggggtacaaaaatccgtttgaaacccaatttggccgcctctttgacacgttcttcgatccgattgacgcggcgcacttcccccgtcaatccgatttcaccgacaaaacaatctgtcggtgaaatctccttatctcgataagatgacgcaattgccacagccatggcgaggtcaatcgccggctcatcgagtttcacaccgcctgttgccttgagataggcgtcctgattttgcaacatcaagttagcccgcttctcaagaacggccatgatcaagctcacgcgattgtgatccaacccactgctcgtccgtttagcattgccatacatcgttggactgatcaaggcttgaatctcgactaagattggtcgggtgccttccatcgaaacaaccaccgcagaaccggttgcccccgccaagcgttcttccaagaagatttccgagggattggcgacttcctgtaacccgtcttgatgcatttcaaaaatgccgatttcattggtcgatccaaatcgatttttgacggatcttaagattcgatacgtgtggtgcatgtcgccttcaaaatagagcaccgtgtcgaccatatgctcaagaatcttcggcccggcaatcgccccttccttagtgacatggccaacgatgaaaatggtcacgcctttggacttggcaatgcgcatcagttctgccgtcacttcgcgaatctgtgccacagaaccgaccgctgaattcatttctggcacattcatagtttgaacggagtcgatcacaacgtaatccggctgcatttggttgatgacgtcttcaatactcggcatgtcggtttcgggatacaagtacatccccgaatttgccacgccaagccggccagcccgcattttgatctgactggcactttcttcgccagagacatacaaaacggttccgccggtattagccaactgccctgacacttgtaatagcaaggttgatttaccaatccccggatccccgccgatcagcaccagtgaccctggcaccactccgccgccaagcacccggttcagttcatctaagccagtcttgacgcgcgtttctttggtgatcgtcacatcgttcatccgcgtcggctttaccttactgccggctgctgtttgtcgcggcacagacttgcttgaactgacagtttcttccactaaggtgttccagccgccgcaatttggacaccggcctagataagtggctgaaatatagccacagttttggcaaacatattgtgtttttgctttcgccatattatcccttcaatagttacgctttatcggttgaaccgaacccgctttgtcgcttggctagaccgccttcatcgccgtctgccaataagaatggcatgaaaataccttgaccgatgcgatcgccttttttaatcacgacatcgcgcgggaaaaaattaagtagctgaataaagatttcgccttcattggctggattgttatagtaatccgcatcaatcacgccaatcccgttcggcaacaccaagccatgcttcaatggactgctcgaacgattcgctagcactaaaacttcattgggctgcatataggctttgatcccagtcggcactaagtaaggtttcaacaccttcttagcgcgttcaaagtctttattggtcaatgggtgctcatttttaatcaagcggaaaagccggataaagtcgtaccgccaaatacttcttaagacgaagtcctcacgtgcataaaagtcgtaaccagcggcctgcttcgtctgccgggtcggcaaagttaaatcttcatcttgatactttgaaacaatctcaaaacctcgggtcttcatagctgcctccatttaaatagtgtccaaagtatcataccatgcgggcacatggcacggccatggtgaaagggcttcccttcttgcaattataccgcgttcctgatagatttggcgtagtagacaggttattaaacaggcaaacatgcaaacgtctgaagctgcttaagaatcctctaaaagtttacctgtaccatcacgaattgacccaaggaggtgccccatggaattccaacgagaaccaggtcgtttttttaacacggactgggacggccgcttaatggccgaagtcacttttcaagacattgatgacggtcacgcgtgggcggttgaccatacgtttgttgacgaaagcttgcgcggtcaagggattgccggccagctgattgaaacagtcgtggctgcagcccgcaaggaaaacaaaacgattgaaccgctttgttcatacgccgtccatgctttccacaatcaccccgaatatgccgatgtcttgcggccaacaaaagaagcttaatcgtccgccgtactgacatcatcacagcaacaaaaaaagccgctataagcggctttttttgtgagcgcaagcagactcccttagaaacctgcaaccgggtaataggcgacaatcgtctatgctagccgatcattccagcgattcttcttagttggcaacaggaagtaaatcaataaccagatttgaccgatgattggcacataccaaagcaaaacccaccaaccacggcgatccgtgtcatgcaaacgccgaactgacagcgaccaattggcaataaaaataatgaaattaatcagtgatgcaagaaaggtttcttttccaggctgaaaattcaaaacacgcgtgacgttcatgccaaaaatattaaataaaatcgtcatgatgacatagccaacgataacattaagcaaccacggccaccaaaattcacgccgcgacgccgtgccagaaaagttgcctaaatgcttaaaatagttctgatatgccttaaccataagcttaaacccacctaactagataattgtatgtccaaataatactggacatagtctaaattatacttttagtaagtgcttattaaaagtaaaataccccgaaacttcttattctgagaatctgcagcattttgttgaatagattaacgagcttgtgccactcaatgatccattgattttccatctttaaattcaaattaaaatgaggtaaggtttctttaatgcaataaaaaggagatcgcctatgtcagaaattacatttaatcaaattaaagactttcaagcccaactagccaaacagccggctgccggcgccacagctcgtgcggtgcaaaacgttggcccacaagctgcaagtcgcgaacccattgacggcgaagatatgaaaccggtcttttctcttgatcttgataccggtaccgttgctaaccaaaagaaaagtggccgctgttggctctttgccaccctcaataccgttcgccacggcattgctgatgaattcggcattaaggacttcgagttttcacaaaactacaacgccttctttgatcgtttggaaaaagctaatttattttatgaaaacattttagcaacggccgataaaccgcttgatgcccgcgaagttgccgattatctgagtggcccggatcaggatggcggtcactatgatcaggctgaagcactgatcgaaaaatacggtctagtccctaagtcaatcatgccagaaacctacaacagcgaaaaaacggttgaactcaacagcgttttgaatgagaagctgcgcaaagatgccaaagtcttgcgtgagttgaaacaggccaacgctggcgatgacgccattgccgctaaaaaacgcgaatttctcagcgttgtttaccgcattctcgcatacacttttggcaacccgccaacccaatttgactttgaatatcgcgatgataagaagcagtaccaccgcgacaccaacctgacaccgcagtctttcttcaaaaaatatgtgaagtggcattttgacgattacgttgtggttgcgagtgatccggagccgaacaaaaaatatcatcagctgtataccatcgcttcagcgaacaccgttgtcggcggtcatcccctgaccattctgaatctaccacctgaccagttgaaaaaactggctttaacccagctacaggcgggtgaagccgtttggttcggcaatgatgtgctcgctgatatggatcgcaaatctggcacgcttaaaagcgggctgtataactacagtgacttattcgatctggatcttcatttcgacaaaactgatcgaattgtgactaccgaagcagaaatgtcgcatgctatgacgctgaccggcgctgatgttgttgacggcgaggtcaccaaatggaaagtcgaaaattcttggggcaaagacaacggtcacgatggctattttgttgctgatgcatcttggttcgaccaatatgtttatgaagtggtcgttcgcaaagatctgctcgatccagctgatcaagcagcacttaaagcaacgccgatcaatgtacctgtctgggatttcctgaattaaattggacttgtatgctagactaatgatgttcgacaaaggcagcgcacctacatgctagctcatgctttcatgaacgcgcttgtcttcgtcttcataacgcgctcgccagcccagaaacctgcgtgtaaggaccccagatgcaatggccaaaaccccatcacatctggcgccgcttacactccggtttctaaccgggctggctcgcgctcacaaaaaaggagtgtcttttaatgtctgcagaaattaccactggcgatctggctcaattcaaacaagatctccaagccacacccggtgcctccgctcttcaaaaagcggtcatgaacaacggtatcaacgcaactgctgagaacaccgacagcaaagttgccatgaccccgactttttctattgaacttgataccggcagcgttgctaaccaaaagcaaagtggccgttgctggatgtttgccgccctcaacacgatgcgtcacggcattcaagcacaatttaaaatcaaagacttcgaactttctcagaattacaccttcttctgggacaaatttgaaaaatccaattatttttatgaaaatgttctaaaaaccgccgatcaaccactcgacagccgtaaagttgcttttttgatgaccacaccacaacaggatggtggtcagtgggatatgttgtctgctttgatcgaaaaatacgggatcgttcctaagtccgtgatgccggaaacttacagctcaagtaaaagtagcgagttgaacggtttgttgaacttgaagttacgcaaggacgctgttgcgcttcgcaaactggttgctgataaagcaagcgatgctgatattgaggcagctaaacagaaaatgttagctgaagattatcggattttggcttacaccttaggcaacccgccgacgaagttcgacttcgaatatcgcgatgatgataagcagtatcatattgaccgcgaactcaccccgcagaccttcttcaagaagtacgttgcatggaaccttgatgattaccaaagtatcatcaatgcgccaactgacgacaagccatacaaccatttatacacggttgaaatgctcggcaacgttgtcggtggccgcgaagttcggcacttgaacctcgatatcgatactttcaaagccttggccgttaagcagctcaaggcaggcgaatcagtttggttcggttctgatgttggtcagagttctgatcggcaattgggcatcatggataccaacatctataagaaggatgatcttttcaacaccgacttcaccatgaccaaggcggaacgcctcgattacggcgaaagcctcatgacccacgcaatggtcctcaccggcgttgacattgtcgacggcaagccaaccaagtggaaggttgaaaactcttggggcgacaaggtcggtgacaaaggctattttgtggccagtgattcttggtttgacgagttcgtttaccaagttgtcatctccaaaaagtacctgtcagctgacttgcaagacgtcatcaagaacgaatacgacaaaccaaccgttctggccccatgggatccaatgggtgctttagcttccaaataagtccatacgaattggtaagctgtcatattgcaaagcctcacggtcaatgatcgtgaggctttttgctgttcgcaaaccccttgcgaaaccatcaaaaaatgttttgctagttgacgtatcgaacttttttgattaaagaaaaatgtggtattctggtgacacatcgtaaccacgcgttttttgataccggagtcatctcagaaaacgctcactttggagggcaatgtatggggacacaattcgcctttgactggcgccaaatcattcattcacgaaaaaacatggccgtactcgggttgttcatggccgcttttatcgtggcgtttttcgctttaagttggaccaaacggctcgatgtcactcaaacatcacaagcaacagccaacgccgcgttggccaactatgctgaatataatctggatacgttgagtcaagcacaaaaaccattattggctaatcttgacgcccaaaattcagcaaccggcgttattggtttgggcctgcagcttgatgagcctgacactacccgtaatgggctgcttagtttacgtacagcgcagctagccatgcgccaacatcattacaaagcgctcaacacgatgccactgccaccgttgcatcagcttactggcgatgtgcggagcctgaacgttttaaaatctgaaggccggccggctgcaacaagcgttagcacgagtgcttcttatattgttttggtgttaccttatctcggctggatcactggcgccgctgcgatattgctcagttgcgacagttggatcgagcggcggcgacaccggacactcatcactgctcgtcctttgacagctggccttgcggggagcagccgcctactaatgcttaccgggttttacatcttaacgctgcttgccggttttgctttgatggttgcgacaccagccctgatagctggcctaggtgacttcaattatccgatcgccgtcatgggtacagccatactgccattgtggcaatacatacttttgtttggcggcctgacaatcttagccggtatttggctcatcagttttagtatgctagtcaatgcttggatcaccaacgtttatctgaccgcctttatcgtcatggcagccggattattgccagtcatgctgccacagctcttccattttctgtggttcctgccaatgccatatctagacagttacgcgacattaagcggtaccttagtggatcgcttgaaccagccacttgctagcgtcgtcattggcactggtttgctgtttctctggacctttgttaatctctttatctttggcctacgtgtcaaaaaggaggcagcatgatggcttattttcgttttcagttccaccagctgctgactaaccggaaaaatctagcggtaattggtatcgccttagttgccctgatctgccaatttgtctttttcccaccgaacaccacaccggtcgagttaccgacagcaactgttttaacccgtgatcgcgataaaaatattgcctttgtcaacgaatcgcacgggcctaataccgctgtgtgggtgccatcaacacgcgaatttgctaagcttgaaacccagatgttaacagcgcaaaagcaaggaaaaaataaagcttacgttcgcgcaactatcaactatctcggctttttgcgaagatatgctgctaatcccgatgcccaaagcagtccgttccattacccgctcacctattattacgaaaatcgtcaatatcccgatgctgatgctgcttacgctaatgttgttttaacgcaatcactaatacctttggcaaaacaagcacatccaaatgtatcgacaattcatcagcaaacattctggcagacacttttccgcggcgcactgggtggctggctgacagcgttgttgctcatcaccattctgcttgcgaatgatctgctgaccagcgagcaacgtcatcgcagtatcgcccgttctttgccgctcagtccgtggcatgccatcaataccaaaacgctgacggtgcttggtaccctcgctgggacagtcaccctgctaattggtgtgactgctgtatgtgtcatccccttccatggtcttggttcactaaccacagccatcagtaactttgccaaaaacgggtcttacgcttatgtccagccacttgcacttggttctgctttactcatgatgcttggtttgactgtactgctcatgtggctgttcattcgacttaacttgctttgccaattgctctttcacaacgaattgatcggactggttctcagcgccctactgctctttggcgaaccgctctatttcatgcaaggtctagccttctccgtaccccaaacagcctactatctgcctagttacatgaatccagcagccatcgtcaacggcctacaaaatttcagatacgataccggccaaatgacaccgttatctggggtcatcgtgattggcagtgtcattgtcctgctagaaatcatgctgttcatcgtgacacatcgccgacatgctgcgacggttaaatagagcgtgagctggcgcggttagaaaccagcgtgatgcgtacgcattttacaggagggtacatcatggaattgcaactgcaaaatcttgcattaagttttaaaaacaaacccaacgtcattcacgacatcagcctcaccatgaatggcggatcaatcgtcgggattgtcgcccccaatggtaccggcaaaaccaccttgctgcgcttgattctcaatgatctaaaaccacaagcaggcaaagtgctggtagatggtaaaagttatggtagtcaaaaacaaagccttgcgctgcaccggcagatgtgccttttcccagttcaagatgatctttatccagatttatccggcaaagcgcacctcgagtattatgccaagctgtggcacaatcgttccaaaagcgtgaaacagattatcaatgtgctcgacatgcgggactacatcaatcaaccggtgcgtacctattcaatgggcatgaaacagcggttatgttttggtatggtcatggcggccaacaccccgatcatgctactggatgaatttatgaacggacttgacacgatcaatgttgcgcgaatgtctcgcattttgcgcggcttacgcgcagaaggcaagctgattatcacggtctcccacttgctgaacaatctgcaagggtacgccgacctcatctacttcatgcgtgacgggaagatcatcaaaaccatcgaccaacacgaacagcagcctttatatgtgcaggttgctgaagaaaatgccagccgtttaccacgtatgccgtgggaacattatcccaacggtatgttggtgctgccaatccaaaaattgccaggtgagcatttcaatcaactactgttgggtttagcagcccaccatattcccttcaaacttgggccactcgatcttgatacttatttcaacgaattttacgaaactgatcaatgaaataaaaacaacataacgtaactcatgccgctgtttcttattcattagtggccgacaatataactaaatttattattcaggcgaacgaatgccgcaagttcgccttacaatatgtcgtgattctgctacaatgacggtattacttttcaggaggctcaaaaatggcgtcaggcttgactgctaataagaaactgcgacataaaattactgccgcggctttactggtaaccctcggtgtcgtctatggcgatatcgggacgtcaccactatacgtaatgaaatcaatcgttgctggcaacggcggcatgggacattttgatactgactttttggtcggctcagtgtccttgattttctggaccctgctcattatcaccacggttaaatatgtcttgattgcattacgggctgataacaatggtgaaggcgggatctttgcgctgtatacgcttgttcgccagcgcgctcgttggttggtactgcccgccatggttggcggtgctgctctgctggcagatgggatgctcacaccggctgtgaccgtcacaaccgcgattgaaggtttgaagggtgtccatattaacggcaacatcttaatcgacaatcagcaacaggtgatttgggtcaccgttttgatcattaccttcctgttcttcattcagcgatttggtaccgatctgattggtaaggcgtttggtccgatcatgtttgtctggtttacattcttaggcgttgctggctttattgccttgtcaaaggactggtccatgttgcgcgccttgaacccttattacgcactccatttattggtcagtccagacaataaaatggggctcttcattcttggcagtattttcctagcaaccaccggtgctgaggcattgtattctgacatgggccatgttggtcgcggtaacatctatctcagctggccatatgtcaatatctgtttggtgctcaactattttggccaagctgtctggctggatcaaaattccaaagtaacggcgttcaacaagattaccgacttcaatccgttctttcagatgttgccagaaagcatccggttaggcgcaattattttagcaaccttggcggcgatcatcgcatcacaagcattgatttccggctcttatactctggtttccgaagctattaaactgcgcttcttgccacgactgcacatcatttacccaacaaggttaaaggggcagctgtatattccagtcgtcaacaccattttatggttggcttgcttagcgatcattggctacttcaaaaccagtgctgaaatggaaggcgcttatggcttggccatcaccattactatgctgatgaccaccctactgttgtaccaatacctgcgttcgcgtcatgcgcctgctgtggttgcgatcgggacattgatcttctttagtgccattgaaacagtcttcttcatctccagcgcggttaagttcttgcacggtggttatgtcaccgccatgatcgcgtttatcattttggccgtgatgtatgtctggcaatacggtggcagaattcgcgacgacaacacttatcgggccgaaatggcttcgctttttgcctataaaaatcaactgtccgaacttcgcaacgatccagattatccaacatacaccaccaacttggtttacatgacccaaattgcgaatgaccattacatcaaaaaggaaattctctactcaattttggacaaacggccaaaacgcgcacgggtttactggtttgttactgtcaatgttacggatgaaccgtataacgccgaatatacaacggatacgtatgggaccgattatatggtcaacgtccaactctatctcggcttccggatagaacaacaggtcaacgtgttcttacggcaaattgtcaatgacatgatgcgtgaaggtgaattaccaacgcaaccgcaaaaatacacaaccattcctgatcgacaagttggcgactggacttttgtcttgctgcacgaagaactttcaccgcagacccagatcaaaggtttccagaaggccatcattcaggcgcggctacgactccagcacatcgcagtttcacccgcgcaatggttcggcttggaatatgcggataccatcgatgaaaccgtgccactggttcttggtaaaattccgattaccaaactcaatcgactaacgcgttcccaagcagaagctcaacccgaagatgaagacgattaagtcgcgttactaaaaagaagctatatctgatgcacagcattctgctgggcgcgatatagcttcttttttatccatcaagtcgattttcgttttttgtaaacttgtcatgtggactagaaaatcgaatttttttgaaactttttactgcaagcggctttatgaaggctgcttcgtctgtttttctgcacgcaacgttgcctgagcagcagcgagacgagcaaccggcacccgatatggcgagcacgaaacgtagctgacgccaatttggttaaagaaggtcacagagtcaggatcgccaccaacttcaccacagacgccaatggtcagctgcggctttgtcgcccggcctttctcgacagccatctgcatgaaggccccaacgccttccttatcaacggtttggaatggatctgctggtaaaatgcctttactcaaatagtccggcaagaacgagccaacatcatcacgggaatagccaaaggtcaactgcgtcaggtcattagtcccaaaactgaagaaatcggcagcattcgcaatcttatcggccgtgatgcaagcacgtggggtttcgatcatggtgccgacttcgtaatcgactttgatcccttttgttgcgactagttgcttgatttgatctgtcaccaatttccgaacccagatcaattcagtctcggagttggtcagtggaatcatgatgtgcggggtgaccttcatgccttcgtcggcaagccggaataccgcatgcatcatggcccgaacctgcatctcataaatatccgggaaggtcacagctaatcgatcaccacgatgccccaacattggattgacttccttgagggcagccatccgttcgcgtagctgattttgctccaggccaagatcttgcgcaacttcactgatttctcggctatcatgtggcaagaactcatgcagcggcggatccaagaggcgaatcgtcactgctttaccattcgcaagccgatatagctcgtaaaaatcctgctcctgcattttttctagcgcttgtagcggcgtcttgcgaccagccgcatctttggccaaaatcaatcggcgcatctgcaacagccgttctggttggaaaaacatgtgttcagtccgggttaagccgatgccgtcagcaccagatgccagtgcttgctccaaatccttaggagtatctgcattggtaaacacggccatgcgacttgcatcttttgcccatgtcaataaagtggctaagctttctttgaccatcgccgccgttgtggtgatttgaccacgatacaaattgccagtggtaccgtcaaccgatacccaatcgccttcgtggagaacggttgacccaaccgtagcggttttggcgtgttcatcaacgcttagtgcgtgcatgccgacaaccccagtcgcacccatgccgcgagctacaaccgctgcatgtgacgtcatcccgccacgcgctgtcacaattgcctgactgacaatcataccttcaatatcttcaggcgaggtatcttgtcgcatcaaaataacttgatggccggcatcatgcgccgttttggcatcagcggcagtgaagtagacttcaccagaagccgctcccggtgaagctggcaaaccagttgccaaaacagtgtgcgcggccagcacgtcaggatcaaattccggatgcagcatgtcactgatcgatttaggtgccacccgcagaatagcctcatgctgattgatcagtccctcgttaactaaatcaaccgcgattttcaccgccgcggctggcgttcttttcccattacgcgcctgtaacagataaaaatggccgtgttcaatcgtgaactccaaatcctgcatatcacgataatgttgctccagtttcgtagcgatggttgccagctgatcataaactgctggcatttgtgcctgcaaaacggcgaccggctgcggcgtccgcacaccggaaaccacatcctcaccttgtgcgttcaatagatattcgccgaacaaggcgcgttcgccagttgccggagcacgtgtaaaggcaaccccggtcccagaatcttcaccagcattcccgaaaaccatggtctgaatgttcaccgcagtcccaagatcttcagggatttgattttcccgacgataaatcacggctctgtggttattccatgactcaaagacggctgcaatcgccgctaacatctgatccttaggcgcctgtgggaacgttttgcctgcctgctcatacagttgcttaaatgatgcaatgattgcttgcaaatcagtcgttgtcagatccaaatctgaagcatagcccttatcacgtttcatggtcgttagaacgtcatcaaacgctttttccgaaagaccgtagaccacattgccgaacatcgcaagcaagcgacgataactgtcatacgcaaatcgtggatcattcgtgagttttgccaaagccacaacggtttgatcattcaagccgatatttaggattgtatccatcatccccggcattgaaatcggcgcgccggaacgaaccgacacgagcaacggggatgtctgatcatcgaactgcttgccagttgcctgctccaaggccgtcaagtgtgtatctaattcttgcaacaaatcatctgagagaccgtgattggtttgatagctgtggcatgcagcggtggtaatcgtgaatcccggcggcaccggcaggccaagattcgtcatttcggccaaattagcacctttgccacctaaaagtgcgcgcatctccatgttgccttcagcaaatgcataaatctgtttcatcataaagtcttcctttcgtttaatgtgacgtgatatatgttcgatttataatgtattatttttgaagacaaaatgcaagcgtttacacctaaaattggcctaattattttttgaatcattaatgacaacaaaaaagccgctcgcaacaatgtacgaacagcttatgggacaagggtttcaatgagatatttaaaaattcggttttttgtaatttttccaatcacatgggtatcgccagcattttggactaccggcagcgaatcaacattgtgtttaaggagcagtttgctggccgcgatgatcgatgtatcagcggtgacggtaatcacattcggcatgcgggtcatgacgatgctcgctggtaacgttgtatcgcgattagtaaagcttgctcgtaacaaatctttacgcgagatgaggccaactaaagcaccatcatcatctaatacgtacaatgaaccaacgtcggctaaaaacagtttggtgacggcttcttccattgatgtcgtcaatttaatctccgtcggcggcagtaagatagcagcaatagtggtctgaaagaacttttggctatccatttgcaacagattctcgccttgatacgcatagccgactttaggtcgcgcatctaagattccaattgttgtcaacagccgtaaatcagcgcgaattgtcgccaaactaatgttgagcttagtcgccaacgtttcccctgtcatcggactttccgctttcagtagctgaatgattttattttggcgctgggtcagttgcgtgacggccacctcctattcattaatgttaattataacatttttgcgatatatgacgtgatatttcgtcgcgaaaaagtttggcaacttatttggagaggctgaatactagcaaaataaagtggctgggtcataattcttagtcagctattaaaaacgaacggttttccgttattggaaaaccgttcgtttttgacttctcatggattatttattgcgattttaaagaccgtagtgccaaggcggagcaatcgtaggccagatggggctcagccgtgcaaacaacacagcgaccgggctttgtcgctgatgttgttaggcgacttcgagaccgcgggctttgcgggctcgaagcgccgtctccgctctagctacgcgtcgccaccccagctggccggagattgcggagtttggcacggcaaaaaagttttagcctagcgactttctacgattattcggaatttaatgaatcacaagtcttgcaagggaattatggctcagcctccataattttataaagtttgcttatccataatggttagcttgtcatccaaggtgtaaacaatcggttgggcatttccaatttcgaccttgttgatgccagcatcgctgatgtcttccataaacttcaccaaggcgcgcaaagtagagccgtgagcgacaatgagctgatttttcccggacaaaaggcgcggtgccagttcagctgtccaatacggtaacaaccgttgactcgcatcggcaaggctctcgccgcgcgggatgatcgtggctggataacagtggtaacgccgggttcgactaggattagcaagtaatggcgggtgtgcggaaaaacttcgccgccaacttgcaacctgatccgggccgaacagcttgcgcgtcaagtccttgttaataccacgtaaggcaccgtaatgccgctcattaagccgccaacttttcgtgatcggcaggtagttctggccgatcttatcttgcacgatgtatgccgtcatgattgcccgcgatagcacgctcgtatgaacatgatcaaacaagatccccgtggacgcgattttttccccagctgtctcagcctgtgccttaccctctgcggttaaacccacatccgaccagccggtataagtattcttctgattggcgatgctctcgccatgccttaacaggactaatttaaccacaaaacggcctccttaacccaactagtataccagactgcgcgggcgagtggtaaacgcatcaaatagtgctactttgcttagtttcatgtttgtcattctacttcattgatgaaaccagcggaatagcaatggactcaatggtcaaagcgaagcagttttcttcgctttgactaacacctagcggcgagacggcgttggccttgcgcattagctcgaaattgtgccccaccactctaaccagctcgggcttccggaacaagctcattagaagagaactaaaacccgaaccatccccattttctcactgaaccacgcgaacaggcccagaagcctccacataagggccccccaaagcccagccatttaggcttgaagtcgcttacgttccagcttctaactgggccttttcgcgctctgcatttttgccggaaaagctggaaaatgataggctactatatatacgagatcggcgaaggcttgtctctttgcctttagaaagaaggatgctcatgacccagtcgcataaatcggttacgatggtcgagctgttctatgatttaatttttgcctatgccgttggccgtatggcgcaagcgcttgcactgccgacacatggtttcattgctccgcgtatgcttggtgagtttttgatgatgctacttgttttctgggtgatttggacttaccaaactgtcttagccaaccggtactttaacaaccaactagcccaaagtctctttactctttttaatatgttctgggtcatcgtcttgagtaccgccatcaacgttgatttcgttaaaacaaaatggtcctttcaattgagcaccgccattttgtttttgagtgttgcgattcaatatggcctgatctggcggcaaaaacatgctgctttacccaaaatttttggtctgaccttaacaattgctggcgcgctggcacttgtatcgcctttcctaaccccatactcgctgtcattcacggtcttctttttgggcgtcgtgggggccagttttgtcccgctgcttttctggcgaacaatcaatgctgccccggtgaattttagtcatttgagtgagcgttactcgctactggtcctgctgattttcggagaagcggttattggcgtggccgatacggtttatagcggcttatcactgcaggccggtttgtttttctttgtggttatattgctttttgtggcttatcagctagtttatgataacggccttaaccgccagataaaaacaggcggtttggcagctattcatcttcattacccgttattagcggccatccttagcatcagcacgtttatccacctgtggttgactcaggaattagatccgcgttggtttgccgcggcgattaccttggctttagctgtttactattttagcctgattggctatttgcgcgcctatccaaccagcaagatcgacatcggcttcaagcgttggttttatttagggttttcactcatgatttttggggtatacagcttcatgacggcggctatgccattgccatttatgctaggcttaactgcgtatttgctggccaataccttatatctttggcaattcattctccatcccaacgacccgttgtataatgaaagtgatcaatgaagggagaattcatatgacaacatatgatgtcacattcaacaccgtcgatggcaagtcgctgattaagcgcaacgtggaaagcgaccacgaaaacgcccgggtctgggaggacgcggttgagcgatttgacgccgatcacctctacatcaaaatgaacgacaagacaatggtcagccttttgcggcgtgccgttgttcgtatcgacatgactgaattacctagtgatgtcgaaaaaaaggctaatcgccgagatgaatttcgtaatgccatgtacacattaagtcaaatcgggctgtgacctgattgccgctaagccttgttgccatttcaaatggcagcggggcttttttgatgtgatcgttagcagataaagctgactgtgattgcccttaaaagcaattgaaatggcacaaagacaaaaaatcctccgcaacagcaaagtcgcggaggtcatgattttatatttttaaagcacgcttctggctgaattagtcagcatggtagattgcaaatttaatccgaatttttggacaaatttgtcagcataacctgatacggtgtttgccagtcgagtattttaagcggtcgctggttaatttggagtaacgtcgtcgttaaatcttgagcactaatgtgctcaaaacgagtccctttaggataaaaataacgtaaattccgattaaagcgttcattactaccacgttcagctggagtataagcatggcagtaataggccttaataccatattgtgattcaagtgatactagcccactaaactcagtgccacggtccacagtaaagctgtgcaccggaccattaaaagtggttaggaacttagttagtgcttcattaacagtcgctgtcgtccgatcttttaaccggtatgcccaaaggaaccgtgattttcgatcgattaaagttaataaaactgccttactatgcccacgaggaccaacgactgtatctagttcaaaatcgccgatgcgattacgttgattaatcatcatgggacgctgttcaattgatcgccccaaagattgattatatttggatcgttggtcaacgttacgccgttggcgtacgccatgttcaggtagatcattcaaggagaaaccaattctcccctgatttagccaattataaatagatttagtagctagtttaaattcgtgagcaatcattcctggtgaccagcttagacgtaaagtaagcgtcacatagtgcagtacctataattgtcaaaatcctccctctatacttggtctatcaagaagattggaggatttctttatgactcaaaccaatgatctggttccaatccaaatggtcaatcgcgacggtgccgccgtcgtggtgaaacccaaactaggagccaaaattaaactaaacgaagccgaagtccttttctacaatggcatcgataaggtgatggcccggattattttgcaggagttgatggcccatgatacccgacctgtccaaagctaacatttacatcatttgcggtcgcaccgatctgcgaaaaggcattgatggcttggcggccttggtcacggaggagtacaagatggatgtgttcgacaatgcgttattcatcttctgtggtacccgtaaggatcgtttcaaagcactgtattggaccaaaagtggttttctgcttttatacaagcgctttgaaaacggctatatgcaatggccgcgcgatcgcagtgaaattcgccgtttgaattatcgtcaaatgtcacgtctggtcaatggtttagccattgaagaacgccgtaccattcagcctgtaaccccggggtatgtgtactgattgtctgaaagaaagtcttttcttgaagctgacgaaaaggctttcttttcgtgtggccgcttgatatacttttttcaaccattttaacggagggcgcgagatgtcagcggaagcagtcgtgacgacagaacaattcgaatatctcaaacaagagaacgcgctgcttcgcgaacaagtcgagttcttaatgcggcgcctgtacggcactaagcgtgaaagtctcactgacggtcaggttgatctctttgatcaaaccaaaacctttgtggcgccaacagttcctgaaccagaagagcaagatgacaaacctgcaaaacgtaaaaaacaaaaaggcaggaaagcagcgcaactggctccttttcctgaagtggctgtgcaccacgaactaaccggagcggaacgccagtgcccacattgtgccgctgagatgcgtgaaattggggccacggcgaccagccgcgaaccggttcggattccggaacacgttgaagtccacgtccactatcagcacgcctatgaatgtcgccagtgttccaatcagttagatcacagcgtcatcaaaaaggcgatagtgccgaagccgttcattcctaacagctttgcctcaccaagcatcctaacccaaacgatgatcgaaaagtatcgtaaaaaggtcccagcctatcgccagataaaggattggggagacttggggctcgaactaacccgccaacaaatcaccaactggcacattcgggcttgtgactatgggttaggcaatctctacgaactgatgcatcaaacactgctcaaacaaaccgtcgtccacgccgatgaaaccagctatcgcgtgttggaaagcgagaaagtaaacacctatttctgggttttcgcctctggacgcgcggaagacgagcagattattctctatgagcacgccgattcccgcgccacggaagtcccgaagaacttcctcaacgggtatacacattatctccaaaccgatggctatcaagtgtacgacaaacttgatcaggtcacccgagtcgcctgtctttcccacatccgacgtaagttcttcgaggccatgggtaaacagggcaacacgcaaagcggtgccaagaaaggtgtgacatattgtgatcgcatgttcaagatggagcggccatggcggttattaacccctgatcagcgctatcaaaaacgccaaagtcaactgaaatcaactatgtccgatttcttcacttggtgtgaaagtgtccacgccttaccgcaatccaaattcggccgcgccatcgactatgcactcagtcaacgcgaagccatggaaaatgtgttgttggatggccgtttggagctttcaaataaccgcgttgagcgcgccgtcaaggaactcgttatcggtcgcaaaaactggctattctccacgagtttcaaaggggcccggtcaagcgggattatcttgagtgtcatgcgttcggctgaggccaacggtctcgactgccgcaaatacctcgaatacttatttactgaattacccaacctttccgttcctggcgattctaaagcgctgcaggattatttaccatggtcgtcgcaagtccgggcaatctgtgcaagataaacctcaataaaagacaacggcttcggcatttcctcaatcataagggaatccgaagccgttttaaatgtacctcacaatcgtgcgcttacgacgtaaatggttgagaattttttgctttaactcatcgctcagcttagttttccgaccacatcgtgatcgcttgtattcggcatctgtttgtgctaattcagcctgataaggttgacatcgagataattcataagaaattgttgacggtgatcggttcagccgaacgcccatttggatattggacagccctagttcacaaaaggtttcgattttaattcgttcggaataggttatactagacaaaagatcagctcctaaaagatgggtttgtggtaaacaccattttaaaggaagctgatcttttttgtccgaacagcgttcggattaattttacaatctaccgcatagttgaagtggattgaagtcaatatttgagacagattttaagagacattcagaaccgcgtttaccttccacagctcaaataaatcattaatcgcgattaataacttatttgaaccctggaaagcattaaatcaggcggccatttggctcgtaagtgttgcaatttcaacttgtaagggggtctggtagcccagtgaactatgaattctcttcctattgtagaaagcatgcacatattcaaaaaggacggcagcggcagtttcataatcttcaaagaccggcactggataaacacattcctttttgagggaagcgtgaaaggattccattggcgcattatcatacggacaacccatacggctgtatgagtggcggatatgtagttcagttaaacgttgattgtaatcatcgctggtatactgtgatcctaaatccgtatggataatcaggtccccagtaatggttcgatttttaaccgcgctttcaagggtctttaagactaaatcagtagccatcttttttgagaacgaatagccgataatccgtcgtgagtgcaggtccatgatggttgataagtaacaccagccattacgcttcgtttgaatataggtcatatcagcggtccatttttgatttaaaccagtggtcgagaaatcctgcttaagcaagttgggacgctgttcaaccttggttttggaagccgaagccgctttccacttattgacggtaacggagtggatatccagttccttcatgagccgggaaatccgtcgtggactgcaccgaagctgcagtggttgaagttccagattcaattcatggtggatcttcataacaccgtatcgctgcttaaattccgcaaagatccgcagaatccgttgtttcaagtccgcatcttcggcccggcgttttgaaggtttgggggatcgataacgataatactgagctctggaaacaccgaggattcggcacatcttggttacctggtggtgatggctttcttggtgaatgtaatcaaagatattggttacttctgcgcaaggaagcccagggctttttttaggatttcgttctcctcagacagcgaagccagtcgcttttccatcgctttgatttcgtctggcgatttaccggattgagttttggcctggccctggatccacttatgaactgttgaatagccaatgccatattctctggccagttgggcagctgattcgccttgcttatataggttgataatgttttgtttgaattctttgtcgtaacgagttggcatgtaaaaattccttccttttgagagacgatttattcattataccctctcttaaaagttgtcttaggaatcagcttacatccatattgtttcacgatgtagccttgtggtcaatgatcaataatgcccaacaatcaacctcgacaaaattaattccgatgagattaaaagacatccttcagaacccggaactttttaaaacattgagagtcttttttcaaaacaacgaatctgttaaaaataccagccgcatcctatacacgcatcccaacacgattcgttatcggttaaaagaaatcatgcttaaaacaggactagactatcgcaaaactgatgataagttttacttgtatgttgccgtcattacaaaaatgctcaaccagtgaccttcactatcaatttttacaaacaaatatatttgagtatagaaaaagagtttccgttaaaaacggaaactcttttttcacgctagtgacgtgcacccggtcgtttttcttcaggcgctggcgggataaccgctttgccgccttttttaatatgcttgtagttcacgaccgtcttattcttcatatcttcaaccagtgaggcatcatcaggcgaaaaactgtcgattgtcagcattgccgcgttggcatagagcttttcaaccgtgcctttgaaactcaatggcacatcttttgctttacgaactgatactttatcaccaataacgatttcttgtgacacagaaaaacctccttaaaggcattcgccagcaaattcgccgtgcgggcttaacttgctggcgggtaagtgcttacttggtggcctgcactttcactttgatcggtgcatccaagtcaaccgaatcactgaaatgttgcaacaaatagcgctgcatagcgtcgcgcgcttctcgcttagtcatctgatgacagacccgggaagaatcgtgccgatgcccccatttatccgtatactgaccaacgacttcataatcacgaagatgtgctgcaaataacatgattcctcttgaccacctttattaattgtaccatgagtcggcacacgtttttgtatcacaagaagcatttatacaccctagaggcatcagtttcaacttttctaagaaaaaaatttataaaccgctattgacaacgctggtggccttgatcttgcggctttttacggcagcactcgatgctgtaatcctcattttagaggccatgcaactaacttcgtcgttagctacccgacactttctttaacttgattttgtgttgttgctaactgcgtcgtttgactgcgtttcatgcgattgaatgcaatgactgtgcgaccaattaaatcctgtacgtttactcgatcctgcggcgcataatcaagaatttcgaccaatgcagaattttcatagcatttctgaatgcgaccaacaaaatcatgttccatattgccattcgcacgacataaaacgaccatgccttcttttgcctgcttcatgattaagttcccccttgttatgtgttgagctaaggttaacagggcgaaagttttatcgtcaacataaatgatcaattatatataaattttcataatttcgtcacaatcccgccaaaaggcagttgaatgcgcttttattttttgactttaattaaaaaagttctcaaaatattgacaagtcagccgcctctttttactgaaaagtgttgctttcatcgattgaaaagtcgacaccatttgcaaaagacgccctgcttcagtattgacatcttcactgaaaaagccaacgataagaaacaatagactccaaacaaggcgatgattttcgtggataggcacatttttggtgcaactttctcttcactgcggtcaaccaatttccgccgcttctggattggccaatgtatctctgtcatgggcacttggatccaacgaacaacgcaaacatggttggtctatcaaatgaccaaatctgcatttctggttggcttgctcgcagcggctcaatttgttcctatcatggcactcaccttaatcgccggtacgctcattgatcgctaccccaaacgacggattcttttgatgacccaatttggttttctagtcttgggtgctgccatgacgatcatcacttttctaaaaattgttcaatactggcaaattctggtaattgccttaggctatggcattcttcaaagttttgatacgccaactcgacaatcctatgttattgaacttgttggcaaaaaagacctcatgaacggtatttcattgaactcttccattttcaatttggcaaaaattgcgggtccttccctagccggggtgctcatggtcaccataggagtggcgccgtgttttctagttgacaccttgagttacattgccattattattggtttattgatgattcatcagcagcatcctgttgccagtcacacaccgcgccacatcattgctgatgtcaaagaagggcttgcttacatcgtccaccatgacaacgttaaattaagtgccgaattaatgatgattatttgcacactgaactttaacaataatgtcatcatccccatctatgcgcaggaagttttaggccgtggtgcacaaggctatgccaatctgctatcagcaacagggattggttcactgattgcagcgttcctcatgagttatctggctcggtttggcctacgccgcgatttatatcttctagtggcgatagggacggccttggttcaatcgctgatgatttttgttcacgtttattggttggcgatgatttttatggttgtcattggattttgcaacatggttttcttgaatcaatccaatgctgcttttcagttctctatccccaatgagttgcgtggccggatcatgagcgtctacgttctgcttaaccaaggttctacgcccattggcagtttatacgtcggtggtttaatggacatggctggcggcctgtgggggtttccttcctgtggtttgttggcgttgctgttaaccataccgatcctgcttagccatcaaacaacagttaaacattggctccatgcttagaccgtaaaaatggcgttgacacaaactatctgtgatcgatagattgtgccaacgccattgctattcaaaataaactttcaatttttccggatctgcccattgcccaaaacctgatacttaatcgtggtcagtgcggctaatcccattggcccacgggcatgcaatttttgtgtgctgatgccgatttcggcgccaaaaccaaattcatagccatccgtgaagcgggtcgaggcattcacgtaaaccacggcggcatccacctgctgtaagaactgctgactattttggtaattgtctgtgataatcgcctcactgtgctttgtattatgcgcattgatgtgttgaatggcttcttcttctgagtcaacgaccttaacggccataatcaggtcattgtattccgtatcccagtcttcagcggtagcagcgtgcatactcggcacgatggcgcgggcacgttcatcaccgcgtaattcaacgccatgatcttgcaaggctttagcaatgactggcaactgttcatttgccacatcagcgtgaatcaaaagcttctcggctgcattgcagacagatggccgttgcaccttggcattgacaacaatcgccaccgccatttgcaattgggcatgggcatcaacataaatgtgacaattgccagctccggtttcgatcaccggaaccgttgcctgttcaaccaccgctttaatcaaccctttgccgcctcgcggaatcagcacatcaatgtagccgtttaagtgcatcatctgggtggcaacggcacggctaggatcggtgatcaattgcacggcatcacgcggtaacccttttgctgccagcgcatcttgtaaaactgtcgccaacgcaagattgctgtgtaatgcttccttgccaccgcgtaaaatgaccgcattgccgcttttaaaggtcaaggcagctgcatccaccgtcacatttggccgtgcttcgtaaatcatgccaacaacacccaatggcacgcgtttttgagcaatcgtcaagccggcttcgttcacccacgccctgtccgtttgcgcagtcggatcatccagtgtggcaacctgtcgtaccccagctgccatgtcggcaatgcgtgccttcgttaacgcgagccgatcaacaaacttttccggcaaggcgctcgcagctgcaagatcagccttatttgccgccaagatggtatcggcatgcgtctccagcgcagccgccatcgctaacaagccggtatttttctgtagtgtcgtcaattggccaagcgtcatcgccgcggttttggctgcccgccccatctgttcaagatcaattgtcgttgcgtccatatcatcggtctccttttttagtgcacgcgagcaagcttctgcgtctgccaacgtgatatgagccgtttaaaagtgctactaaaacctactattgaaaactttgactgacacttgctgcttgtttgggctgaccgaaccaagtaccgactgggtcgccggccaagatttgtaaaacaatccgcggatcacgaccactggcaagcaccatttgtttgccagcacgcatcatcgtcttggcggccttcagttttgtcaccatgccgccggtcccgaagcgcgtcgaactgccgcctgcagctgccagtactttggcagatagctgcgtaatcgtcggcatgagcgcagcattcggatggcgattcgggtcacggtcatacagcccgtcaatatctgagaggacgaccaacaaatcagcgccaatttgcttagccactaacgccgacaattggtcattatcaccaaatgtcgtgcgatgatccaactcgtcaaccgctacactgtcattttcgttgatcaccggaatcacttgctgagccaataacgcatcaatcgtgtccagcacatgctgacgattcatcggataatcaaatacatcatgtgttagcagcaattggccaattttcgcaccataatcactaaaccgctgtgtgtacaaggtcatcaattccgactggccaatcgcagcaagcgcttgttgctcggcaatgacagctggtcgcttcgacatgcctagttccgccattcccacgccaattgcgccagaggtgactaacaccagctcatagccctgattattcagcgccgtcaaagcgtaggccagtcgatcaatggtttgcaaattgactttaccatttggatgaatcaggctactcgtgccaatcttcactactaatcgtttacattgcatcgcccgttttgccattgctacctccgctgaatgcatacttgtcgagaaatctaatctatcaaaaaaagcaccgccttgatcgagacacccgttaaggcggtaccattctcgttcaaagcaatgctttgcgcttttatcgttatttaagttttgtgagactcatcatacaagcttggattcgcgcacatttcaggactttcagcgattgtcctgatctctgtgaggcgctactatgacttgatgaagtgaattgtatgcgggcaatgacgaaaagtcaagcgcaggtattccgaagcgttgattaccacttatacgcacgcctcatcgttactcaactccgagcaaataattgcctaaggtgtgcccctagaagaaccaagaacccactgagactgccacaaactaagataaactgaaaaggttggctaactcctttaaagaaaagcaggtagcaagccaccacgataaaactcacggttaaaagcaacgcatttgtcattttgttttgtttctttttcgcgcgcatcaatcatacctccaagaactgcaaaagattttaaaacgacacaatgctttcaaaaacattgtatcgtacaaggaagcatctaagcgggttcaaaaataaacgttgtattttcgccgataatcgtgtgtcactgctatctcgacaaccgaaattcagcggggattaaaaactcttttccgcatcaagccagccaaccatttactgaaataaggacgaaaaatataaactaggcataggcagtgtcaaaaatcgctcactgccgcgtcaccgccacccgaaaagcgtaaattctaggcagttcctctcctgtatgaatggcctgaccattggccgtgatgccagtgcgcttcacgtgaatcttgacaggcagcggcattttggtcgcatatggccgcggcaaaagtaggcgctcactgtaaaaagtcccaactggtaggttcttggcgatggcaacaataccgtgccgatctgcttttaccttataggcttctttagaagttaatggattcccaactgaccgccaatgaccatccgttgttcgatagcggcggcggcctgaactgtcgaatcgataaaaagcaaagatgccgccagcaagtggttgctgcgtgccatccggaaagacggctagttgttgaaagagtggtctaaccttcttggcctcataaactgcggcaacatgattggcttttaatggcgtcggctcactttccgctgagccgcttggcatgcccaacatcaccagcagcatgccaagcgccgccagtccttttatcccatattgatgcatccccacacccccaaaacaagtcaattaatattgtaataataactttatcattttggccaaacgatgtgcgaacaaaacaggcgttattaaaattgctagtttctgaggcaaacaaaaagcagtttccgcaatcaccttctgattgcaaaacctgcttttggcttctctcttactgtcaagccatgcaattactggacttggccttttttaaccaacactggcaaaataatgacccgatccatgtaactcggacgatgcatgaaggagcctgcttcacgataagctttggcaccactttcaaagatcatcgaaatgtgcttctcagaaggatcaaggctgatttcttcaaccgagtttggcacgttaataattttagatcctgactttggtgcagtgaagtctagtttggtccagcttttattgcccggaacccgaatccagattttgcctggtgcgctgccatttgactgactgagcaacgtcagcccacttttggcaatggcaatgccttgaagccgatcccagccattgttatacgaattaatgactttcttttgaatcagcgatttaaagaccatgttaacttcttgatcgagtgttttgccggcaaactttggtgcaagttccaaagcccatgctttcatttgcttcatcgtgatgggtgctggcagcccatttgcattgagcggtaaggcaaggatcgaacggttctttttgttctgaccatatttaacaaaaaccaattgattgttatatagggcaatcgctgaggtccgtcttgccaaatgaagttcaatccgggttgactttatcggttgttgcgttgctttagccgaataggcatcgatttcgcgctgtgacacataactgataccagcacctgttgtctgcgcggcatcatcagaccaaagcagccgctgatggtcgatgtcgtaagtgataccaccaacgtgcgatttgctccttaaaattaaggttttattgtacttagcattatgcttgttcacctgaacaatgattgaattcagtttgtgattaccatcatacaagctcatatagatcgcatctttggactgggtgaccccctgaggcacccagttattgccaaaacccgcttttttggttttagcattgatcgaccaagcaccgcgaagtccaggaatcaccactaatttggcatcggtggccgcgcgtttttcaagcggatctgattgcccgatagctttaatttgcttaattgccgcgcttttggactgcaacggccgcggatcagcttcccattttttaacatcacttggctgatcaactaactggctgtactgataatgatcaatcaacgcccagccgccaaagccaagtgcaacgataccgatgactgacaataccgtcacccaaacccattttttcaacatgcacacactccttcatatcagaattataatatatcagaattaaccatgcgattatataacccgctaacaaccataaaaagcagcaatgaacatcttattaacctgtatatccccgagcttgtcctgtcttactgactggtttttttatcaaggccaagtaaaaacctccgagattgctgaccaatcttggaggttttttgacaaaattggccaatcgaactttcttcctgacctttcatgacctgcgctgtcggcgcaagtaacggcgggctaaccagacgatcagcacagctagcaacagcacaccgccgataagcgcggcgcttttccaaaatcgccattgatcagcggcttttgctgcttgtcccaacgattccgtatagggcacgcgtttaccagtgaccaacaagcgatgcgagttgatcatgtatggcgtgcacgtcatgagcgttactaaatcctgacctgattcaatctgcaagctttcagtctgatctggtttcacagtttgaatgcgaaagaccttgtatgctagtttcttgccgttaacttcaatcagaaactgctgacctttcttgagcttcttcaaccccgtaaagtagcgcttggttggcaagccgccatgggccgaaatcactgtgtgcgtatttttaccgccgcgcggataactagtgcccggtaaaactacggcgccttggtcaagcaaggtgttgttggtggtatcaaatagtggcaagtcgacttctattttcggaatcgcaattcgcccaattaaatgctttttaacataagcctgcttgactttttgctcactgttaaaggggtcttggccgggtcgcaggccggtttcggcgagcgcgcgattctcagaagcgcgttgtgcatcttgggctgcggcatttttggctgcttcgcgatcggcttcagcacgacgactggtcatgatgacttcattgatcgccgtcgccgcaaaagggtagcagaagcaggcagcccccgcggtgaagaggatgatcacgagccagcgcaacagccggttcgaccctttcgcctgcttagccataggcgatcaggctttcttgccggtttgcttcttcacatagtaaccaccgctcatcaagacgatgccgatcagcagaaatgcgagcagtcccatcccgccggtcatcggcagcaatgtgcgtacgggggtgtttgtgatgcgaacgattttctcgccccacgtacctgcaacaatctcaaagtccgtggttggatccgtgatttcatagccatcaggggcatctgtttcaatcaaggtataagtccctggcagcatcccttgaatcgacaggttaaatggctttcctgcgctagtggtcagttcggttgcatcagctttcgttgtcgtccaagtgatcttacttggggcataagcgcctgtcataccggtgacaccttcaagcacagcatattctgttgtattgccattttgtcgctgaatgatgaactttgcaccagccaacgacttgtcatcggaaccagtttcatatttgaagaacttcatcccgccagtctgaatttccgggccgttaacggtgattttggtatcaggatcaaaagaaacaactgctgtgttcccgattttttgatcaggtaccatcttctcgttcacgatccccgtatagccaacggtcacccgtttaccggcatacttcgtcaacaaattacgaacggcattggcgtctgatccgcctaagaaatctaatttgaagccgaatggatagttgccatgcgcggtttgccatgccgcgtcatttgaggtcatcagcgcgattttgcctgttaagtcgttcaaaatattctgaccgtccacagtcactgcggttagttctttaaacgtcaagccggctttggtcatgtaatccagcacttcaaattgattgtacttgaacacgccggattgattatccgccattgcgccaatgtcatggggaatctgaaattggatattgtaagtcaacacatcaccgacagcaacgtcatgtaagtctttggcggcaactgctccgccattgatagcatctaaatgtttggtaaccacactatccttagggtaaagatggatattggttaagtcattgccattcttgtcacgcaccggcagactcacgatcatatcagctgctttttgatagggctgaggcgtccatgtttcactaaaagcataaacgctgtgccgaccaccggttttagctggcagttgattaaaaactgccaacccatcttgacccgtcgtgatttctggcgcatttggatcttgaagatttgcatagttgcccagattctgcgacatcatcgccgccgcagtctctttatcgtgtgtctctaatagctgataaaaagcatctgtaacattaaacactttgaattttgcaccgacaactggggttctgccagtgagacctaaatcatggccagtgttttgaatctgttcatctgcgttttgttcaattttgtgaagggtaaatgcaacctggctttcggcagcgtgaacggttctgccagcgcccaatagcggtagtaacacgctcatgagcatcaaggcggctaataggccgtgtccgatcttttttatcgtggcattcatgggtggttcctcgctttcttatgcttgatcaggaagtaagttgccaatgtcaggagtcctataccgatgagaatgagacttaggttttgccagtcagacattgctggcaaatatccagttgcgcctgcgccagtcggtttgtctgactgatcagactggcctgtcggcggtgtcgggtcggattcgcttgaagtgctgctgcgatctgtatagttataaactcggggattaccgatactgatcatttccggtgtcacgatcccgccgatgttttctttcatcggctggccgtcaatcagtacataacggtaattgtcatcatcatctaaccaagagtcgggaatttcgattttaatcgcccgacttttttcgtccaattcataacctggtactgactgtaattcttcaaaataatacgtgcccgccgacaagaatcgttcacctgtgttcactaaaccgtctttgtccgaaacaaatttattcacacgatcatcatgaagagcatcggttgatgcaacccatttgttcttcaagtcagtagctggtgacaagtcgagatatagtttctgaccgtccacgattcggtagatcgcgaaaatggccccggctaatcgccgactcgtcccgtcaggatgaacgccgaatttaaagaagtacgggtcccggacataaccgacgttcttgggataaagatgcacggtcgacattgggtcacctgaagtcggatcttttaccggaaaaacaatcagcatcggtgagctttttctttccatgtcaacgttcagatcggtggagaaatccaacgcggtttcaatcagcagatacgctttctcgaaactgccttgaccagtgtcaactgtgacgcgtccaatcccgtcttcaccaagatttttatcggcggcggtgttaatcaagccaagtcctttattcccttgacctgcaagttgcaggtttgcccgcgcaaacttaagtgcctgcttgcgggtcatattttgatacttttcgatcagtgcctgaacgtcatccggtgtcatatctgacttcaacaaggaactagcatcgtaaacttcaaaattagcgccattcagaccactagttttgctcaacagtttatatccagccttgtcggggttttccggatcaattatctgaccgtcattgtcgtaccaaacgtctccaggttgccgcacatcccggtaaatgcgtttatgcaagacaatttcggcagtgttttcagccgcgctgactggctgaagaccaagcagcgtgccaactaataggaggagtgggataacccaccatagcaatcgtagtcgcatcttaacgcgcctcctttcgcttgagcacaatggctagcagtaatccgctagcgccggccactaatgccattagcagaaatagcacaatgccattgccgcctgttttcggtaacaaactctcaaggctgtgattgacgactgtaaagctaatgcgattaaccttgtcggtggcgtccggttggaatttaaattcataatcatcagtcgtaagatcactgccgctgtattttaaatcaaccatggtgccggtttgattgatcgtaaatgtgaatgcccccgccaatttatcgaaaccctcaggtgctttggtttcaactaaccggtagctgccaggggttagctgatgatcaaaaagcaaccgcccttcatcatttgtgttgtccgaagcaaccggctcagtctgaccatcgcgatacagtgcaaacgtagccttggctaatggtttgttacttttattgaccttgagtaactcaagttcagttggtttcaactgattaaccaccgtgttgtcgtcccaaatctccccttgccgtccaatcgtcacgtcaccattttcagcgacaattaagtcaaactctgattggagcaagtgtcctggtgacatcacttcggcaacggtgtactttccggggcgtaagccggtgaaggtcgcctgtccttgggcattggtgaccgcttcctgcaatggctggccagcttgtttcaacgtaaacttagttccttcaagtaaagcgccatgctgattctttttagtgatgctggcgggaaaacgattcagcgggtctaaatgcacatccacctcgttagtttccttgctatagcgctctttcgtatcgaagaatttcaccaccgcgctgttggtcattgtcacgcgttgatcgatggtgtcaggatcgagggttggccgaaccttgagtcgcagtgagaaatagccgctgtggaagtagattttctgcacatctgctcggccaatcgtcagcgtgatacgttggcgacccttttcctcagtcacctcaaacgatgaaacgccaggcgtcagtgtcatggcccgatctttgttgggtgcatcaggatcagtcgcgttaaaaagttgaaaggcttgttcataagtcggtggcccattgttctgatccggaatcaattcaatattttccggcaataaatccgtcaccgtgatggtcgtcggctttaccacataatcgcccatgctgtacacttcttggttgatgtagtagtaaaaagggtcgccttggtaatgctcattgaccacctgattgtggagatcgtttgacgtccaaattggcttgtttttatccgccttggcgccaccgccagcaatcgcttgtgcgctgacactcttgttgttggtgacattcgggtcaattaactcaatctgtccgctgccattggcgacccatgtacttccaccgctcgaaaaggttcctcgcttaaacgtgtgactcgtaccattcagcgtataagccacagccccgtggccaaatgttggcgcgccgaggcggtcctcccactcacttagattgtcatgatcaatcggatcaacccagttcccccatgttttcgaggtatagcctttctgaccagtgccccgttcgccaagattctcttgatcaaaaacgtccttgttcgcggtaatccagttaccttcttgaaactgccagtcagtgacataatcagcattgtaagtcgcgttgatatctgactgttcagtccaaacgaactcgcctgggttcaatgatgtaaaggttaaagtcgaattctgattcagatcactttgcggaataaaattcagccgcttgccggtttctttttcataaaagaccacccgccagtcatagtggaggacgttagcgaaggacatcccagaaaagaaattgttcgagaagtcgatgccgacatctgttggcgttggtgcccattcaacgcggcgcacatggatattggtcatttccacataggccccgatctcaaagtgtcgaccattcaaatcactggccgaacctacatgattgatatcgactttaagcttggcatccaaaacattagacaagccatcttcttgggtaatcacgtctttaaaaatgaccgctgttgctgaagaactcggcacataatctgtcgagacattttctttcatggcagtttggctaccgtatttactgcggctgctaccgtttggctttcggtaaatctgagccgacccaatcggaaagtcagaaccatctgccttcgtgacctgaattttggtttcacccaacgctgcacgcggcaggatgagactgtgtgcatccaagctgtctgtgccgggttcgctcacatgatcgttcacgatcggacctggcaacttcagatctagattcagcgataccacgtgatcagtgccattgaacccgtctagactgagcttgaagcttttttgcttttgttcctcactcgagagcttcttcgtcatctcatattcatattcagcccagttattgttttcaaacacatgatttatttcaccattcgtatgagcgggttgtgacactatatctttaaatggcgtcacaacaactttttgtgttctattctcactccacggcttgacgagttttagcttcaccttgatttcagcctgctgcatgtcgtatgtgtaagtcacgacatgctggccgaccgccgctgtccattgcccgccatcgtccaaaacaacatcttgtcgatcaaggcggttggtcaactccggcatctccgtttttctcagaactgctcattgctgcacttgtctgtttcttgtcagactcaattgtgtcttggctaattgccgcttgtccgctcgcatcgttctggtgtgaggatggatcggattttggcgccgcacggtcatgttcggtgatgtttgtctcaccgttgtcggctacagggacaacggcgctgccgacctgggtcagcatcaacatcgccaacatgacgatatggatcaacttcttaggcatctgtgcgcctccttccattgtttccggcgtctctcttcttccaacaccagcttaacaagttgaccccgcgcaaaggaatgataatgtttgttatttaacaagatatttttaacagtgcatacttattgacattataggtattaatctgtacatataatgtaaaaagctctatttatagctaaataaggtcttcaaacccaaaagtagccttgaaacagccggcgtattgccagtaagttccaagactacttataggttatttattcaactaattagtttaagctttgatgattttcccaactgcaattggtaaagtaacgtgggcatcgtagttcatgacagttccttgaacagtagccggtagcttcaaggtatccggcacaccatgaatataaatgacccttttatcgagctgcaaatcgtcactgccgaaagcggctttaaacgctgtctgcaattccttcagatcaacgagtttgtcataagcatagtgaccttctgcatcagccactgggtaactgtcatttggcacatgcatcttggccggttcagcgtcaaatggcaccatcgttgtaccggaaaccgattctgtttctggcagatcaacgaaaccgtcaccattagcatcttgtgccgctgtggcgatttctgctggcttaccatccgggaatccgtggaaatgttcccaatgctgcacattagcaggtgtatcaaacatatcgatatgaatcttcatttgcgcaccatcaatcgtgaacgtcgcggcaccgtgcggcgcggtgccaatcttctcagcgttcaacggcacaatttctgctgtatacttttcagccatgcaaaccactccttttagatttagactcagtttcagcatagtgctaactggaacgactcacaatctattgcatttcaaaagtgaggttgcaagattatttggccaattgcaataaccgttggcgcaaagcaggatcagctgcgtaaagataaagcccatgcttcgccctcttcagcagaatattaatggcattcatgataatcgcggctttagcgtcggtggtgtcggccaaatccgggcgctttttgaatgcttccttgtcttggtactgcgccagatcaaccgtaagtcggtcttttgagggatcatagcctagactcggccctagaatcacacctgcgtaattcaagtcaaagccttgaatagtataaatggaaccaacttcatgcaatgtctcaggacgttgtgcccacgggcgatcggtgaagttgatcttgtcccaaggcaaccgcagagagccagcttggacataccaggttttaccaccgagcactgtgaatggatagtcagctgtcgcgaccatgcgcgaaaggccggtttcggcatcgcgccgctgaatgaggtcatacatcggctgaccatcagaaaaaacttgaaaatcaaaatgttgcggatgtggcaaaggcaacatttttccacgaacaaaatgatcaatccaatcattcaccgccgcatcgcctacccgcatctgttcggtcagatgataatgtgtcactgcgtaatcgcgcgtcactcttttcaataaagcaggtgtccaaaaactctttagcttgactagctggtggaaatcgaacacgagcaccaccactcgagccaactgaagaatatcagcaagctgattatgcccacggaatttattatacggatcaggcatcgtcagtagtaaatggccttcatcgatcagcacgacatctgcccgcttaccggctttgcggtacgcgttaataaatggtgttggtttcataaagtctttctttcgaaaataagactttgtaccagcaatttctttgtaaatcttcagcatttcattgtgatttaccaacaacttgttgtctgtgccagccaactcgccgcttgtcgcacgggcagctttttgcaactgcgcaaaagcagcatccaacaccacacttttaccagcaccggcatcacccgaaatgatcaatagatgtgttgacgttgtgttgtgattgtcgttgataaaggcccaaattcgctgttccaatgctgactgttctgaggtcagtgtcgcatcttgcggcaaaataaacgttgactgtgctaaatctggcatacgaacacctccgttaacaacaatacagcattctggcgtgcaaacgctgctgtgacttgattttgtcggtacttttaaaacattttaaaaaagaacattaaatatacacaacaattaacagcatattacatactttaacccagtaaaccggttacactagagatagtcaatttctcgaaaaagttattcaagaactaggagtattgaaatgccttcaattgctgattaccctcaacgccatagcttggcgtcatttcaacaaacaccgctcactgaacttgatgcgggtttatttgcgcaacttggttatttgaacttcaattacctgatcggccagccatatgcgcgttttgccgatttaaatgacagtactcgcctaaacagggctaccttgacaacttgggcgattccaactcatcagatcatgttagacgccatgcgtcacagtgaacgttttgcccgggttacttgggaaaattggctggaaacttgcagccatcgcaacgaagaagacttcgcggccatcacattcacattagcccccggggtttattgtgtcagttttcgggggacaaccaataaactggttggttggaaagaagatctcaatatgagcttcatgccaacgattccagcgcagcgtcgggcattaagttacttgattaaacaaatcagtcagcatcctggcacttattacctgactggccattccaagggcggcagtatcgccacctatgcgtttgaccacttgccacaaccattagccagtcaagttgcccatgtctatagcttcgatgggccgagcggtgtcccgcttgatccaagccatcgtgaccgtgtcaccaagctcgttccacaaagctccttaattggcgtcagtctcgatccagcgatgaattttgaggtggtcaaaagtcgcgtgaagttgttcggccaacacgatgttcttacttggaacattgccgacacgaccttcgctcacttgccaaccacaacatgggcatcgcgctatttccaaaaaacttttgcactttggttagctggccttgatgccaaagccaccgcggttaccgtggacgcactttaccgcattttgcgcagcggcaatgccatcaccttagatgatctagctaaaacaaaaaatcattggcgccactatcttggggctttccggcgcctcgataaacatcatcggcaacaacttggccgctcattccgctgcctcctcggtgccatggctggctcgctggttcaaacgcattaagagggtcacaagctcggcagatgccgggcttttttattacacccatggtcgtgaaagctggccaaaagctaccccacattttagcaagcattcaacttatcctgcgcactagtgtcaacaatcatccatcagcaatgtgcatcaaaatcgcgtcatatcaatgactctatgattctcagacctctatcaattgaaaaaagcttgtgtaattttattcctgcctcaacaataatagcaggtggtgaaggacatgcaattcagcgacaaactcaaactggctcgccaacagcaacaactcacacaaacacaaattgccgagcaattacacgtttccccaaaaacaatttccagctgggaaaatgcgcgcagtttccctgacatcggcacactcgtcaggattagcgatttttatgatatttctttggatcaactattacgggaggatcagacgatgacagatcattacgacgcgattgacaaacatgcacaacgggatcaaaagtattttcaagttacctattatttgaatgttacccttttcttagtcctctggggactgcaagctgtttcaaacaacttcaggtctgttgtcggttggctcacactcgcatttgtgattaacttgatcgtacttgcgactcactacccagactatcatgcatggattaccggtttgcctcatcgcatattgcttttacttctcattataggagtgagcaccattttctttctcattaacggaaagatcgctaatccccagcaaactaatgccgcttatttaaccggtttttacattggcagcgttgcgaagccactcatggaaacagccggggtcatcttcatgatttttggctatggtgagctaaaagaaactaagtaacccaccaattcatgccgatacgcccaattagtcagcatatgttgctgacttttttcttaaatgcgtatcttgctttacaaggtaccccctcacgattatactatgcttaacaaggtaccaaaaggaggttaagccatgcaaccttcatcgcaaatgttaaaaggcattctcgaaggcgccattttacagatcatccaacaaggcgatatttatggctacggattacatgaaaagctaggtgcgctgggctttggcgatatccctgaaggtaccatttacccgttgctactgaaactgcaaaaaaataaatcaattgtgggcgttcggcgagcatctgaaagcggaccggatcgaaaatactatcacttaaccgaggctggccaacaaacactggctgattttcaacaacaatggcaccaactgagtcaagcgatggctaagctcaaccaaggaggcacaacatgaaaaagttgaaccaaatgcgtatggccaacgatcaacagctcaaacaaattcacggcacagattacgcttataccgaaacggtggttatctacctgcgtggtgcgcttcgcaagaatccatatgcggttgagcatgcgattagcgatttgttgacaactttgattgatgctcaaacagcaggacgcaaagtctcaaccttctttggcgatgatcctgaaacagcagcagataatattttaaaagaattgccgcctgccccgcttgattattttgtcagcctattctggccttttgccatgtttccgctgattgacggcatcttgatgatggtggtcgatcacgaaacccgcctcttactaaccgactttttccccatgttgatcgtttcgttaggcctctttggcatttcatttggtcgaggtatctcgtttaatcggctttctcgtaaaacaatccgtcgtgtcttgatcagcctattcctcatcgttggcttgcctctactaattggctatgtgtcaaatcatgttttcaacctatcgttttctagcaccacactgattcccatctgtggcggctttgtctttctgaatttagggcttgcggcctgctttcgaaaaaacgctttattattccttgggtggtcagcaatctgggctttcacggcggcgacgcttttcttgccaatttcggaattatccgttggcttggcctttgttggcctaggcgcctgtttgctgctacttttctaccgtcctgagtcacagtcacatctggaagtatcctgacctgacgatccttatcacgacaacggtgccaaatgctttatggaggctactcatgaaaaagttaaaacaactccgaactgcaaacgatcaacaactaaaagccattcacggcactgactatacctacaccgaaaccgtcatcggctatttgcggactgatttacgcaaagatccgtatgctattgaacaagctatcaatgacctactaacgacattgaccgatgcacaaacagccggccatcgcgtggctgcattctttagtgacgatccgcagaccgcggcggacaatattttgaaggaattgccgcgtgtgcctgcctggtatctctttgatcaatactggccgattgtcatgtttctatttgcatccatcattttcacgatgctagttggccaagagcatcgactttcattaagcagtatcgcggcacctgttgctgtcgtgtttgctttcattggcgttccatttgcgcgcggcatttcattcaacaaagtctcttctaaaaccattttcggccttctaatcgcctttgctctttttatcatcgtccctttgctaatcggctatttttcggctaaaacaaatgccttttcgttttcccgcccactcctcattagcctttgtgttggcatcgggctggtcaacttatgtctggctggctactttcgcaccattgctttactcctaattagttggactggcatctggctgctcgccttgctcggtctcctcttaccagcatccagtttaacggtcggcctagtaatcgctggtgtcctgtgcgcaacactactgcttttctatcatcctgagccaaaatccgtgattgcggcaaattaaaaaagcccttgcttgtgcaaaagcccttctgtaggtagtcaagttcatctaaaaatctgagtcaatccccagtctcgatcgtccattggcccaatcttcatataaagtttgttcagtgcgtcaggtgcatccaactgatgcaaggccacgtagcgtgaaatgctgttcttcaacttcacagcaaccatctgatagggatcaccattttgcagatgttgcgctgatgtgaacaacaactttcgaagatcatcctgtttggcaatctcagggtctgcataagcaacatcgattgcttcaaacaattgtgtttcttgttttttcatgaacgtgtcctccttacaaatattcaaagccaaacgctcaacccgccacctccgcgcgctcgcatactagcgcctgctaccaatttataaactggctcaagtgcagacggatactgaaagtgatgaacctgcgaataagacgtgatgaagccgtcaaggcgggcagcgacgtaactgaaccgatcaccacgtgccaactgccgtgctgattcaaataaaaaacgtttaatctcatcatccgactgaactgcggcatcattataggcaccatcaatggcctgaaataaccgtgtttcctttccacccaatacgatcagctcctaacgataacggcagtttaacacttcaaaaaatgcggcgcaatgctgaaacggatgaccgatcagccactaaccaccgacatgtcaaacataacggctggttttaatttttcaaattgtcatgtgaactgaaccatgattgattgctgttaccgcccccaaaacactgcatggctattgttagtaaccataccgaatattcgccagggccatcaatgcatcaagcttatccgactctgaaacagttaacacaatctggttgtttttcagagcgctggaaatgtcgagattcatgcggctcagaatgaacggaacagctgaatccttctttctaaacgcctctatataatcacttaacacttgttgtaacggcattttctgctggctatgatttaggtctgccaccagttcagttaaaatactgatcgcttgttctgctcggtcttgaccgccagcataccattttaaaatactcattcttccttcacctcttaaaagtctttcggaacacaaaaaggcccatttcgcgccatggtaccacgtgaaatgggccttttgtgtccaaccaaatgatgctctcaatcacttttccgccatcgcgaatccatgattaagcgggccgtaaacagtcccagtggtaaaaacatgataatcaaagcggcgcgggtcatccattcagcgccaacgccgatattatttaagccgatgttataaatcgctcgataaatatacaagccaggcaccatgatcacaatggatggcactgtgagcgagatacgtgggtagccgtcaattcgattgatcgccgaagcaagtaaccccgcgaccaacgcgccaataaaagcggcagccgccggtggaatcgtgctcaagtcgaccagttcaagtcgcagcgtattcgccactgcaccaatcaaaccagcttgtaccgccatgcgctttggactgttaaacataaccgagaacccaaagacgccgctgaaactggcaatcaaccgaaaaagcagcaaaagcatcggattcaatcccagatcaacaaagttttcagggcgcaagtgcacaatcatcgcgactaaccaaccgaccagtgatgcgacaatcgtaatcatcaaggcatacagcaggcgctccatccccgaccgcatatcctgcttcgaaatatctaacatactcgtgatgaacggaaaaccgggaatcacgaagagcatggcaccaatataaccggcctcatgccgcgcagcgatgcccagactcatttctaatccacgaaaaacaaggaagtacgctaagcaagcaacagcaacactgacgccaatgcaggccaacaaggtccagctgcggcgaatcataataccacgcaaccaattgccgatacccgcgccaacaaaacagcaaaccatctcaactggaccaccgccaagcagaaaaacgaaagcgcaacacgccagcgccgcagccaatcctgctcgcagcggatcataattacccgacattttctggatctgatcgagccgatgatgaatctcgcgcaccgtttccgtggtatattgcttttcaaaattgcgcacaaaccgttcaagtgcatcaagtttatctgtgttcacgccgctttgcgataatgagagaacttcggagtaggcgtggttgttactaaaacaagtgtaggataacgaaatgaggccaatatcagcagaacacgacattcgcaaagcacgcgcaaccgtgttcatagcttcacgcacgcgccatgccccagttccacacgccagcaacataatccccacccgaccaacgagtgaagcacgttcctcaagcgtggcatgatctgcctgccgttcttcgctgacaatcacgtcataccatggaatctgcatgtgatgtttttctgaaagtggccgcgttcctcgcgctgtctgattactttttgccgtcataacttgtgccgatccttcttcttataggaatgtgttatcttgaaaaaatgaaaataaacattcactattttagcacatctgacgtacacgcgttggcgattaaaccaggcctcgtctcttaccccgacagtttacgctgaaatacggcactcaaatgacactttttaaagcagctaacacagcagctacgagataacaaatgatatgcccatcattcaaaacttaacctccttcgtctacgccactagccgcaaaaatgggtcgggtgcctctaggctagttttgattaaatcaccaacgcgtcgtcaaaccctagctttctgttctttaattagacgcagttcacgcctcaattgacgcaagttgcctagccacaaaaatgaaaaatccagttcaccattttcatcagcaaataccatataaggattttccggatcaattaattggctcatggctttgcttgataactgcaatccttgattcagggtcttaatctcgtgaatcaggtgtctgcgaagtattcttttccaaaagaccggcaccgcgtaacaaatgacaccgcccatcaccatcaagctcaccatacctgcatcaaccaaagcgtctatcttcaacaccccaaacttgtgatcctgctgccgatcaaacgatcgacacgctaagagacaaccagtgtgtttccaatgtttttagttacagccaaacaaatgggcaaaaaagcgttgtatgccacgcctttccggttctggtttgccaagtggttccccgttcgccaaacgtcgaatgtcatcaatcgcatctcgccccaattgactcaactggatactttgggttgacaaaatgaaatcaattttttgggcaaatctaaacaattggcgatcaaactccggtccatgcggcagttcattgtccatatcaccggcgactctatcaacgacatacgccatctccggcgaccgattaagcggatgcaactgatgaatttcatgacggagaatcataatcaatttcctagcttccatttcaagttgatattccatacccctttacctttcccttaacaaaagataacgcccatcccaactttaacaagcacttgcttattgtaagattaccatctcccgcgttgtgtgacgcaatctgtcgattaacgtcgtgttttggccgattaacgtcgtatttttcatatttcacctaaaaatgagccttaattttactggtgattaaacattttatcgacaaaatattgccagtaagttttcgttcccgtgataacggcggcctgtccggcgataccgtagtgcaaggtctgccgctgtcgttcactcagtggcactcgggcctgtactttaaagtaattgccaactttagcattcacagttggtgcgacatcaatggcatcaatccggccagtcagcgtcatcggtgatgggacattctccgcaattcgcagtcgaacgctttgaccacgtttcaaactcatgatttccgctggcgaaaccgccagcttcaactcagcttctttttgcgtggctaagtctggcaagatttgcgccaaaacggtgccagccggaatgtacttgttgccacttaaggatgcttcaagatgcaaaacaccgcttgctgatgctttgacttggtagttcttactttcgtcctttagtgccgcaagtttcgcctcgccttcttgggtaccttgttggactttcacctgttctgcagtcatggtttgctgcatatggctttgcaacgaggccagttttgcctcattctgccccgtctgctgcgctgaaagatcggcctgcttctggttgatacgttgggtgcgcaaggaagcgagggtttccttttcggttgtcaataagttttgcaactgtgactggtactggcctttcaagctgttcaaattagcagcatcggcatttttagcctcggctttatattgcaaataaagatagttgtacccgtgattgtcgcttaatgggcgatcggttcgtatggccgtttgggcctcacgaatcgccgtcattttagcctcgcttgcctgcatactggtttgcaacaattgatcgatttctttgctcttaccatcggccacaccttgggtcgcatgcaaggcttccgattccagttcgtaaacccgacgctgactgagataatcgcgaacttgttgctgataaccgaatttatcaggactcgcaaaaagatttttattggcagcaatactctggttgagaacttcgagctgcgctttttgatctttcaacgtcgccagttgctgttcaagcactttcaattgtgcaggatgagcaacatcgtgatacaccagcaacgtgtcgccgcgtttgacatgcttgccttctttcatatgattcgtcacaattcgattcgccgccgttccttgaaccgtgaccgccgttttgaccggcgcaatttccgccgctgttaaaacggtcacctcgcgcttggcgaagatcagaaaaagcaacaacaaaacaaaaaggatcgcggtcggcacaataatgactgttgaaaaattacggtagcgatggttataaaactcggttgtctctaacttctttagatcaatcatcgcggcctcctcactcacttaccaaccgagcataatagccttgtttggccaataactcagtatgatttccttgttcaacaatcgcaccatggtccatgaccacaatctgttccgttttagcagcaatagtgagccgatgagccacaaaaataatggttcgatcagtcatcgctaacaaccgatcaacaatttttcgctcggtgatcgtatctaaactgctggtcgattcatcaaaaatcaacacttttgccggtgataataacgcgcgggcaattgctaggcgctgcttttgtccacccgataaaatactgccgctttcagaaagtttggtctgccatatctgcggcaaattcgaaatatctccggcaatttccgccactgaacaggcaacttcaatatcggcttcagtgatattcgaacggctacccaacgttaagttttcaatgactgagccagaaaaaataaacggatcttgtggtacatactcgatatattgtcgtaacgttgttagatcaacatcactgatgggaacaccattaaatgtgattttccctttgcctgtgtccactggatagaaacctactagcaacttggctaaggtcgattttcctgatccgctcatgccgacaatggtgtatttggtattctccgggatttcaaggttgatttgtttcaaaacatcttgcccaaaaccatacttaaaggacacatcggtaacattgatggcgccatcaattaaatgccgatcattcaaacttcgctgttctttaaactccgattcaaccaaatacacttcattcagtcggttattcgcgactttggccatttgcaattttggttgcaaattaatgatgctttctaacggattagtgaaatatgccaacaacgcattgaacgtcagcatctgtcctagactcatcttgttagccatcaccaaactcgcaccaatccacagcacgaccacattcaaaaccaacttcagcagtcccttgatcgcctgctgcagttgatcagcttttgtataattgaacgactttttcaaatacgtgacgaattcacggtcaacccgttcataactgactttctcaccggtcagtgatttaatcgtctcaatcccgttcaaatcctcgataatggatgaactcaaaatggcattgctttccatcgtctcttgattcagtcgattaaatggccgctgaaaagcgaacacaatcaccaaataacaaggcacagcaattaaagacaccaagaataaggtggtgttttgaatgcctaacacgatccctaaaattaagacaatccaaatatcaagaaacaaggtcataattgtgtttgccagcgcatcaataatcttattagcatcggaaaaccgcgacacaatttccccagtccgacgcgtggaaaagaaggacatcggtaattcataaagatgcctaacgtaacccaaaatgacatcaatcgacaaacgctgtcctaaaacagccatcaaaaaattttgcccataggttaaaaccgactgcaggacataagcgaggatgaggccactggcaatcattcccaaagttgtgcgcatcccgtttggaatataagtatcaataatcgactgaagaaaataaggcccgacaatactaatcaacgtgatcaacacagcggcgacaataatattggcaatgattcctttttgtcgcgctagtatcggcacaaacgcaaagagactgcctttgtcctctttgcgtggttgatattgcggttctggtgcaataaaaatagcgacccccgaccactccttcgcaaagcgctctttgggaagccaggtcatcgctactgatggatcaggatcgccaatcaagatatgatcctttgtcgccttaaacacgacataataatgaagcaactcgccacgcttcaaaacatggacaagaaacggataaggaacatcatcaagatcaaacagcgtcatatccgccttgacagccttggtttcaaaatgaagcgcctgagcagctcggacaatccctaacgctgttgttccttcctgatccgtcttcgccaattgtcgcagatgcgctagcgaataatccgagccattaaattgcagcagcatattaagcgccgcaaccccgcaatcgcgctcatccacctgaggcgtgtagtaacgcttgtaatactgtgcttggccgagctttaggttgtatttgatcatgggcatgcctcctggttggtgctggatttttctaaataagtgataccttgaactgtttaaaaaatgggttgtcgttatgacaacccttaaccttacagaggagaagactgtcccagaagccactaatcagtcaaattctgcgaaggcttgtggaacaccattttctctgtaaaagcgtttaacataaaacttaaaatccaagaaaattgtgcaaagcatgaaattgtttagaaaagatatgatatactgtcaccgataacgcggtacccgctttaataatatataaagctatttttatatattattatcgtagtaatataatcttttaattaaacaaatgatcaataatctaattcttttgttttaaagagctgccagaacaagttggttaccggccttacctttatttcatctaccttaatgatttagatgcgagcgaaacctcgtaaacacgatttccctgatttatttaaacaaaccatcaaaccatcttcttattttgttgaatgttggcgaaacatcacggatgctgtcacctccaatgaatcccaaaagttcttcgtcactcatattgaccattttctgctcatcaaactgtttcatttctttttcctcctcattcaagttgaagtattcttttgctttacatgaattcaatgtaacagacttttggcttgttcttgttttccaaaaataaacgtagggttttcgccgattaacgtcgcttctacgtctcttcttagtttgttacaatgattttttaaccctactcagcattcagaggtcaactccatggaaacttattctgatctagcctatattcttttaacatcacccgtgttcatcctaggcataacgtttctgtcatatatttttttcaaccgaattaatctcattcacatttttttttggtccatcttagcgatagtgttgtttacaacactatcgctacttggtgaaatcttctttggattgatctatgcctactacatgtcaaaaactcataaccgatctgatgtattctgggttttcctatttttggaaatcaacttgattattgtcaattttcaaacactactggaaaagtccttcacgttatcaatgaccaataactttttctttataaggtagattgcaaatttaatccgaatttttggacaaatttgtcagcataacctgatacggtgtttgccagtcgagtattttaagcggtcgctggttaatttggagtaacgtcgtcgttaaatcttgagcactaatgtgctcaaaacgagtccctttaggataaaaataacgtaaattccgattaaagcgttcattactaccacgttcagctggagtataagcatggcagtaataggccttaataccatattgtgattcaagtgatactagcccactaaactcagtgccacggtccacagtaaagctgtgcaccggaccattaaaagtggttaggaacttagttagtgcttcattaacagtcgctgtcgtccgatcttttaaccggtatgcccaaaggaaccgtgattttcgatcgattaaagttaataaaactgccttactatgcccacgaggaccaacgactgtatctagttcaaaatcgccgatgcgattacgttgattaatcatcatgggacgctgttcaattgatcgccccaaagattgattatatttggatcgttggtcaacgttacgccgttggcgtacgccatgttcaggtagatcattcaaggagaaaccaattctcccctgatttagccaattataaatagatttagtagctagtttaaattcgtgagcaatcattcctggtgaccagcttagacgtaaatggttgagaattttttgctttaactcatcgctcagcttagttttccgaccacatcgtgatcgcttgtattcggcatctgtttgtgctaattcagcctgataaggttgacatcgagataattcataagaaattgttgacggtgatcggttcagccgaacgcccatttggatattggacagccctagttcacaaaaggtttcgattttaattcgttcggaataggttatactagacaaaagatcagctcctaaaagatgggtttgtggtaaacaccattttaaaggaagctgatcttttttgtccgaacagcgttcggattaattttacaatctaccataagcataacgtctaaattaatcaccaatatcgtactgctcatattggctatttggttgtttggtacgaggaaaaaaattgtcaataatatgcgtcatttggttcaagaaaaagatggtatttggatgtcggctatcttttacctaggtgcttcttgcactgtcatgtactttctagagtttacctttatactcctaaagcttgataatgttcttgctctactcatactatctgccttcatttttttcatggttgtcaatttatgctctctattttttattttgagatcttaccgatactatcttgagctactggtcgttaaacacacaaatgaatcacgacgagcttactatgcatcacttaaccaacaaagggaaaatactagcaagcttcttcatgattataagaacctactagcaacgctccaactttcattgcaacaaacttcagcaagtcaatcttctgacacgagcaatatcatcgcgcaagctcaaaggtcaatacaacaagctgaaagtggcaaggactcattagcagcaatcgaaagtgatccgcttcgaaatctcctctatttgaagtggtcagaagcgacgaatagtggtattagattacacatccacaccgaaggaacaatccaaccgctgagtaataatgccggttttgccgtcatcagagcacttggtatcttaatcgataacgccttagaagaatctatcaggattaacaagactcatttcagcgtcctgctagtggcttcagatcgggggctagaagcaagcgtcgtcaacgatatcaatgatgatttcaatctagcaaaatttgcagaacccggtttcacaaccaaaggccgcgggcatggcaatggcttgaccatcataaatgagttaatccagcagaataaaaatatcatcattaaaaagaccgttattaacaagcaactaaagatcactttgtttatagggagatgacttcatgaccaaccaccaaacgatgctgaagattttcattctggaagacaatgctgacttcttgaatttcctagaaagtacacttcgcaattatattatgattgaggcattgcatgccgaaatcaaattcaccactcagtcagcgacagatttgttagatgctgttgatctagaagagattaatgactgcctttttctgctggacattgacatccctggatcttctgtaagtggtattgatatcgccaccatccttcgaaaaaagtccttatacgctgacatcatgttcatcaccagtcacactgaagaagccttgtcgattctggcccacaaaattgcgcctttagacttaattgataaaagtgtgctttttgaagttgaagcgcgactgcgatcaaatattgtttacgccatcaagcgattgaaggcgcgtcaattgcaatcgccacgactttttaattacagcattgattcaaatctttttacggttatattagatgagctactttacattcaaacaacccctggtatctctggtacgttggaactacatgcagaacgcgaaatcgcaacctttccgggaaacctgaaggaggtatcgctccaatacccaacattgtttcgctgtcatcgaagcattttgctcaacccaacgcatatttctaaattggacacgcatggccgttttgtttacatggataatcaagacaaacttgaggtcagcattcgtagagtatcggccctgcgtcaggtcatgatgaccgcgaataaaccacagtctgctaccaatgatctgtcaaatgatgcttgaatggtatatctcttttttcgcgtctccactagaagcgaatctaaacggtgatgaaaataaaggtcacttgaaaaaactccaatattcccataacctggcagaaatatcaaagtttctagtaattgtttcatttaactgctgaatacgacaacagattcagtgttgtttcctctgaatctcttacagcagtgcttactcattaatgctgtttaattttgagatataaatacaccttagtccagctgattagttcatgagaaacaggcgctgcaatcaaaaactgtttcagtccttgattgcagcgcctgtctatttgatgacacctttagaataacttttaagaagcgacagattctcaaacctatttctttaacttgccctgtctcttgcccgattttgaagaagcaaaagtcaaagaagaagttgttaatattaacaacgggacgataacgccaactttaggaatcacctttaatgcaaaggcaagcatgtacacgggtaaaaaaacaataccgagccatccaataaatcttgccattttatctccagttatgatcatgttgacctcctgattaactatttaagcgactgcccactttcccagctggtagccaaagctgtatatcatgcttcaatgccttttaacaccatgccaagtaacaagtccactaatttccagtacctgcttagctaccttacacacagtatacgtccgacaaatggttctgtggtcctaaaatttttaacgttggtaatttaaagtttttcgttaattcttttaaaaaaagtgcaaaagtactgcggaatagacaattttgcgacgtttacttcttcggcttttaaactagtttatgatagacaaggcatcgaaaaaattcctaattttgtctacgttgcactagaaataaatccgcattatcacaacctaatctcttgttatctgttacactctttcttcgaatgggcgtgataaggatcaatcaataaaagaattaggcttgttataaccacatcgcatccagttaataagtgcctataaaatgactaccacaaaaatacctccaactttcttgatttatcaagaaagttggaggttgtctggattttgaaaatggaactaattgctgcctcaaaaatgaacttcggcaaacatcccatgagcaggcacttcaataaaagatccaaaactgtcttacacgtttgtcgatcaaccacacgtgtgacaaagaataaacttaaattgaagcatctatttgagacgccgagctatctctggtcactgctaatcgaagttaaaatgattgaagtaactaaagcaatggcgcagataccgacaatcttgtgacaacttttaagagatatatggtatcgataggcagtagtaagcataggtacgatgcttactgtcagcaaatttcttcgtacgctatcgccatgtgcaagctaggtcatcatattgataagccaaaatagtatacaaagttgaaaaaatctcctttaagttggtagatgttgtcctccttgagtatatcaagcatcagttcttaagatcagcttgcgcatgaaacgagatggctaaccaattctacaaaccgattgacaaatcacaaactgtgggacttgtcagctagactccagccacttgtggcgccaccagcaatttcatctgcgtgactccacgcatccgatgctaggaatcccagaatggcagccaccgggatcacaaatgcaaaaccgccagtgatctggctaagttctttatcttttaagttagtcatggtgtacatcctttcttcctgtttagcttagaagttagtttttaggagttagttgcttgacaagatctattacaggacccctcgaaggtacaaacagactaccagtaagcacgcttcgtgcggagaatccaagaccgaagccaatgattgaccataaaccaccgttttcgccaccagcaatcttttccaagctgctgttatctaaagtcatgaattgttgcattgttatccctccattttctttgagtgattcattgctaaacatttggttcttaggtaaaacggtcgggggtgctagctaccctacacacaatatacggctagcaattgcttttgtggtgacttaaattttaacgttgatattttcaatttttttgtcagttctatcgtcaaaaaatctaaaatgcgacgaaaaaaggggattttacgacgtttattttttgatgacccatttttcttgaacactagttattatgagtatgaaatgatgtaatgatactgaaagtttaaagatgctgagcataactcaatggagatgactttcatgaatgcatacaagcagttgaaacaaccactgtcaatgtggatcattaattgttgcttagtggcgttgctctttcttgttcccgatgattcaagtatctttgtctatatcgtgattgacctcgcaatcgttgctaacggttttgatttattaaagaaactatttggtctgtcaaagcatgcggactggcaccacaacacttggaatcgtgatgaatcaaaataagcctacaaactaagcgtcgcctcgtcatcgcttaatttgtaggcttgtttttttgactcttttcacacaccacaataaaaataacgagaaagatcaaatagtagcgatcaataaatgaaatgtgaggtaacaaatctagatcacttaaaatcagccaaactatagcaaataaaaagccgccaccaacaataaagctgctcatttttctaaaactcataaacagacccactctctatcattcttcaacaaggttcgtttttggcaataacgcaaacagttcattcaccgattgggagattaaatgcattcagacgttatgatctgtatctgattcacttcttcttttcatcagatgcacacaggctgtccagacatggcgccaatgtacatagaagtaataatggtagcacaaaatcaccatgatcagtccagccgattgctgatatcactgtataggtccaataggagaatgcctccaatgatcaggcaaatcttgaatgcttttgccattcgaatccttttttcggttaactaagctcatcagtcgtgctgttccgacataaacctcattttgacaaccttgccatgaacccttctttgtcatgacagtgccatagggtccacatggaaatgaccaagtaaatcgtagcccagatcaacgaaacagttatgagcgtcgtttcgtcacttaccccatttaatttgctgggataagggccgtgaatcagcgttaccaagaagtcgatcatgaaatgtacaaagatcggcatcagtaatgtgccataacgaacgtagagagcagccagcagcatgcccatcccgctgacttgaatcatctgacccacagttgcaacagcaccttggcttggcagattactcaagtgtgcaagcgaaaacgccagactgcttagtaacatgcaatagagaaagttacgtttggtaccaccacggttagcaaggtaaaaggcgcggagcaagccaccgaaaataaccccgcggtataggtactcttcaggaacagcggcgatggtaccaatgacacttgcttgtaaaatatctaagaagtttcggttggtaaagatttgccaagccacaaggcagcccacaatatcccagaacacaaatttctgccagcttggccagccaaatgacgtcctaaagataatcttttgtcttaacagcaacagattgagccccagaatgataactaaactaagtactttatagagcacaatgtctgcccaaaaatccagctgtagaaaattcaaaaatggggtgaacacaaatgcttctataagttcatccaagataaaaatgtataaaacacgtaacccaggcgtgaacaaccgttgccgtttctttttcattccgtcaccttcatccaagttgacaaagccggctttttccgacattgctatgaacaatataccggttaatgaatggcctttagtcaactaattttaaacgtcgtgttttcgccatttaacgttgacgatcatccgtcaaaaattcgctagcggtcatttattgacaaaaaaagccacttcactcggcaaacgactctactctacgctaagccaagaagaagtgacgctgcagtgttgaaaaagtcgcggagcttgcaattggcgcaattcttcaccggtcacaaacacctacatgccctgccatccctttaaaaaccccgcaataatttggtcagtgtgtgaccaagcatctatcgcaatcaatcctaaaatcagcattgtcaggaatttacgtcaggtcatcccgtcaatcatttgttgcaaatcatcattctttattcgatgcatctcatcgtgctccttccccaaccagtctaaatcaagtggtaagtcacagtataaacagcgtaacactcggcttccgacttcgcatttgcatgtgccaatattgggaacaaaccgatcaagtaatgaagtgcggtccgccaacctgactcagctcttcatgaatatcattctccataaaatttttcagttgttgccaccactgatcagcttctggggataatttcatcccctgtaggccaattaagcgaacgaaccgagaatacaggcgcgctaatgcgtaatcaatggctctattttgaagcacattttctttttccaaaatatgtagcgcatcatcaatgacctcttgtgcatcggtattcatgacactgacggttgcagttttttgaaagctttcgttgagccctgtcataataaaatagactttatttcgctgaatcatgttcataatatgtcaccattccttttgatgtcgtgacaatttttccgtagagaagtttgagaaatatcgatcttatgagttttaagcaaaatactgaagaagcaacgtctttaactcaacaagcggctattaatatcgctttatacttgaactcatgcgcacataattcaacattgtaatcggttatattttaaagtcagtttgtgcttgtgtacagaaatgcagcttctggtttatgcattgagtaaactggccaattggctaactagaaagagtcaaaattagcactattacgttaaaactcatgtgtgcgacaactgaggtgaagacatcagtttgatctcgattaaccaaactgaatgcaatgcctaaacagaagtaaaaaagcattgcaggtgaaacatacccatgcaagactgcaaagaggattgacgatataagcacgccaacgaaccgctttttgaaaatttttgcatttaaaatacctctaaaaacaacttcttcccataacggcgcaaatacacagaccgccagcaacatgattggcacagcgtgttcgtcaatcgttgcaccgtcagcttttggaaagacggtcgaaaaaatccattcgaaaccgaccagcgaaattcctaagcatatccccttaagtagcttgagataggatggtttgaggtacccttgttgccagcagtaatcataagacttcagcaaaaagaagagcgcaaatgcataccagccgataagggcaacctgctgattcaatcgaatataaaccatcgaaagaatacctgaaagaagttgtggcagaatcaagccaaaacacacgggaaacagtagaacagttggcttttcgggcttttgttcctgatgacggtcttctaatgaatggttagcggcatacttgctcaattcagtgtctcgctttttcatatccggcatcagtttcccgcaacaacgtgagtcctgccgccaaaagcagtagtggcagcgcgaagtcgccttggttgacccagcccatggcggcagccagcgtaaaaaggaagacaccactgatgcctgtcactaaaatataatgaattgctttattcaacgtcagcgccatcttgtaccccctccgtccagatgaacttcgactttttctcgtggatgctttcacgcacactatactggataattcacacaacggcgcaaactttttttaaacgtagggttttgcccgattaacgtcgcttttttgtcaaatatcaaccaaattttctctttatcgatctgctactcggtttttcttaactggtgtcaacaagtttcatggcaaaaaaatagccgcagatcttagtctgcgacgttttttggcaaatgataactgattgatcatcaactttagcctcaccgtttaaaattcacagccccacctcggctagtgtccccaaacaataggaatggcgattaagccggctgccagtgcttgtgcacgataatgtgctgcatcaatatcggcagcaggtacatcttttttgatgtaattgaagacggccaccagctcttctggtacggcgtgatgaatcagatagtatttggaaatgtcgtgggacaactgagtgacagccgtcacataagccttatcgtcatcaccttcatcaacctttttggcgttggtttcgataagcgcccgtaatgccggctctgctttgatcgttgggttagcgtatgccttgcttagcatcgacattaaagtttcacgtttatctgtcatcctgcacttcctttcgatgattaacttggcaattcatgctcactcggagcaccttagtctttgtgaatattgttaggatgcgcttgtcaattgctaatttcaagtatcgatttggcgtttagatcatcctagattgcaataataaagttaccacctagaaagaggcttgctcactgcttgaactggggtttgccaacggagacattttctaggtttgttattgataagcgctgtggcttgttgaatatcggtctctgaaacctgatcaaactgtgttcccttcgggaaatagtagcgaagttctcgattgaaccgttcatttgtgccccgttcattcgggtgataggcgtggcaaaagtaaaccggtatccgatagcgctttgtaagcgcctgatcgcaggaaaactctttaccgtgatcaaccgtcactgatcgaaccggacccggaaagtccaccatcagtcttgcaaatcccttgagaacagcattttgtgataagttttcaagcttagttgtcgccattaaacgtgtcacccgatcgacaatggtcaaaacagcagcctttgacccgcgaccaccgcgaactgtatccatctctaaatgtcctttttcggttcgccgattagctgactcactgcgaatctcaattgaggtgcctactgcttggttatagcgcgaccgaaggtcttgtcttcttttatgacgtttaccgtgatcaaagagttggcttggctgaaaatcgacttgtctttgataaatccagtggtaaatcgtgtgtggcgcacagtgaacggcataaccgaccatttcaggggaccaacctaggtttagcttctcagttaccatccgcttcaacttaggcgttaaaatcgagtgccgaccacaacgatgccgacaagtatcggcatgatcctgagctataatggcgcagtaatcaccttcagggcaacggtgaagctcatgcctaatagaaatacgagagcggcctaaggtcgcggcgatgtattgaatcgtgtggtgttgcatcagttctatctgagatcgttcaattaaggttataatggccatggaacctgtccttctctctagatggtatgttatgcaaacaccattttagcaagaacggacaggtcttttttcacattttctgggtggtaactttaattatgcaatctaggtcatgtcatgccctgcaaaccctgttttatcagcagccgtgatctcgcggagcacttcgcaaggattacccgccgcaatcacgcgcgctgggatgtcgtgggtgacaacactacctgctccgataatcgtccccgcaccaatcgtgacgcctggtagtaccgtcacattggcagcgagccaacagccatccccgactacaatcggtttagcaatacagccaccaagttgtcgttcaagcggatcaaaaagatggttgctggtgtacaaaccgactttcgggccaaacaaaacgtgattgccaatggtcaccggcgccccgtccaaaatggtacagtcataattggcataaaaatgatcgcctacgcggatattccgaccaaattcacagtgaaagtttgggttcacaaacggtttgaagccatttggcctaccaatttcctaaacaaggcattgcgtttggctggatcgtgttcattgttaagtgcatcagttttggcagttgcttcatcccgcacagccagtaacaaaggatccatgtcgtcgtatggcttaccagttgccatgaaagcaaatttttcttctagattcattgcgccacccctctttcttggctcaagtttaccagacatttgcgcactgcgttgataattgccaatatgttaaggtgtgcttatcggtacgcatgaagtctacaaaaagccaccacttcttgaagaaatggtggcttgaaaacaatgacatcgcttctgcacacagaaccacgcctgttttgttacaaacagaaacatacagttacagtcttcatcgtcacaaaattctggcgttaggaaatttcagctacttcctcggactttatcagcttaatccatagacttaatctcaagtgacattaactcagattttagcttttttaaatttgacatagagataaatgtaaagtcaagtcttccatctagagtagtgagaactatataagggttctggggattgattaacctactcagccccttactagatagtttcaaatcccgatttaacaaaagtatcttggcaatgactttgcttcttgctgccccttgccaaagtcctccaacaaatggtgctagataaaaagcgatcgtcgccagtaaaatcaagataactatgatgatacttattatcttatccatttgtatttcctcttccttttgcacaaatagactaatttgaaatcgatctttgactaagacaagaaaaagtgagcactaccaaggtgttagttatattgaacagttgcgataggagctaaccgtctttgtccaatattaggctgggtgaatgtaattagtgctgagacacaaggataatcctattgcagcgcctgcaacagttgtaaatgggtttaatccagctgcgcctgctaccgctcccccgatcgtggacacaatacacccactaggtttattgcgtcgcttggctcctccttggattaagaccaaatcatgctgttttaaagtaatgcccacttctttacttatcattgcatcccatctcctaagcatttaatagctgacccaaccgctcctaagtttccaccaactacggcgccgccgattatcccaaaaggaccaccagctaggccagtaatcgttcctgatccaataccagccgtgatgccagtaacaaatgtagcagcacaatcaaatttctttttcccacctgaaacccctgacaactgaaaatcgtcgatctggcgataattataagacataattttccttttttcttcaaaaagcaacaagttattttgtgtaaggtcgactttactgtctttaacatacattaattatttgtgtaaaatgccaaaattttttaaacgtaggaaatttccagtttaacgtcgtctttacacttccccagtttacaattcaagtgcaacaccctgacgactagaccataaaggccatgaagacctattcttgttagtgctagctaaacaagaaagcaggaatcttcatgacccactctcagactaacacccacaagcattaccaacaactcagttttagcgaccgtgctacaattcaggcccttcaggctgctggtgacaccgcgaccgtgattgcacagaagcttcatcgcagtaaagcgacaatctcacgagaaatcacgcgtggatctgtaactcagctcgactcgaagcgtcactcgcatcaagtctatcttgcggaaactgcccaagccatgcacgaccgtaaacgcgatagaaccggtcactacgcctttcttaagaccggccgtgcgttcttcaaggctctcgccagggagcttactcgtaagccgcgcgtacacagcgttgatagcttcgtacacttctatcgcgaccagggcaaggcttgcccttcaacgacaactgtctatcgctacatcgacgccgggctgcttgagctagacaacatgacacttcccaagaagctccgacgccgcatcaaaggctataagaacgcccacaagcgcaagaataagaagatatacggcgactcaatcgagttgcgtcctgcggccgtgaatgaccgcacaggcgtgggacattgggaaggcgacttggtcaaaggtattcgcttagctgatgagccagcattaatgacgctcacagaacggtacagccggactgagatcatcgtcaagattcctgactatcatgcgggcacctgccttaaagccttgcaggacacgatcgacgactacggggccaaggaatttgagagtatcacttttgacaatggttccgagtttgccaagttatcagagattgttggaacccagatttacttcgcacatccgtactcgccttgggagcgtggcacaaacgagaacgccaatggactgcttagggaattcttcccgaaagggaagtctctcagagcaattaccctggttgaaattcaagcagtccaatccgcactgaaccatcgtcccagacgtattctgaactatcttcgcccatgcgattactaccgatgcatggcgtaacagcctagaccactatcaagaattcgttatcatcgttgcacttgacttgaaaattgaggtcgtctttacacttttattgttcagttgcgctttaaaagtcaaaaattcttaacgtttaaatctccttgcttggtaaaaacttcaattttttgcaaaaaaaatcgtctcagcaatttgagacaattttttcatatcatcaacttacggcaaatcattccccgccgcaaagtaaatgtcataccattcttgtcgggtcaacgtgatgtccgcgccttccgcactttccttgatatgttcaggattcatagagccgagaatcacctgcacaccaactggatggcgtaatagccaagcgactgcgattgcatttttattggtgtggtagtggtcagcgactttctgcagttcatcattcaacgccttaaacttcgggctatcgataaaggtgccttcaaacatgccgtattggaatggtgaccatgcttgtaaggtcatgtgtttgcgttgcaagtatggtaataggctgccatcatgatcgaccgaggcagcgtcggccatgttggtgtgcatccccgcattgaccatgccagtatgggcaacggagaattgaacttggtcaatcagcaaaggctgccgaatgccgctttcaagcaacgcaatttgttcagggttaaagttggagacgccaaaatgccgaaccttgccactttgttccaatgcatcaaaggccgccgcaacgtcatcgacttccattaacggatctggccgatgcagcaagaccgaatcaaggtaatcaacctgcaaccgtttcaaaatgtgatcaaccgctgacagtaagtgatcttttgaaaagtcgtaccgtttgccgaataccaaactgccatgagagcgttttggatcaacgacgatcccgactttcgattgaatgaataactgatcgcgggaaacgctggcttgcttcaaggcttcaccaaaaacttcttcggatttgccttggccataaatgtcggccgagtcgataaagttgatgccgtcattgtacgcactatccagcacattggccgctttgtcgggggccagcacattcatccgcatgatgcccaaggccacacttgacgcctgccaattggatccgcctaatcgaacttgtttcataaacacaaaactcccttcgatacgtcatttcaaattatgttactgacgacaagttaagtgtagccccaccacttgaggtcaagccaatattagaatttcaataaaacagcttgcatggtgctgagctgcgcggtaggttaagctgtgtctgttacttattttttcttagcaggataagcccataaaggaggccgtgattttgacagttaaagataaagtggttgtaatcacaggtgcatcgagcgggattggcgcggcaacggtacaagtgttggccgaggctggtgcaaaactagtcatcggtgcgcggcgcacagaacggttggctgaattggcggccagctttacggacggtcaggtgctgtatcaacaaaccgatgtgaccgaccagcagcaagtgaaagcgctgattgatttggcgttggataagtttggtcatgtggatgttttgtataacaacgctggcctgatgccactttctgaaatggccgaactcaaagtcaacgaatgggaacgtatgattgacgtcaacattaaaggcgtcttgtatgggatcgccgcggttttaccgcctatgattgcccaacacagtggccaaattatcacaacagactcagttgccggtcacattgttcaccctggaaccgccgtttactccggtaccaagtgggctattcaggcgatcatggacggcctgcgacaagaacaagcggctaatcatattaaaacgaccatgatctcgcccggtgccgtgaatactgagcttttcagcacaattaccgatcctaagcgccgtgaagctgttgaagccgatgaaaaaaacaatggcctcagcgcctcggatgttgccaaggcagttttgtatgccattgatcaaccggccaatgttgccatcaatgaagtgctcttacggccagtcacgcaagaacgttaattttcgtctaaaggagtgtgattgcatgtcgggttatcattttttaaaaccgttcaccttcaagcaccaaaccatcacgttgaaaaatcgcattgtcattccgccgatgacaacgcgcctgtcgtttgaagacggcactgtgacgcgggacgaaatcaggtattaccagcaacgggccggtggcgtcggcatgtttattaccggtaccgccaatgtcaatgcgcttggcaaaggattcgaaggtgagctaagtgtcgctgatgatcgattcatccccggtttgagcaaactcgccgctgcgatgaaaacaggcggcaccaaggctattttgcaaatcttcagcgctggccgcatgagcaatagcaagattctgcgcggtgagcagccagtcagtgccagtgcggttgctgcgccacgggcgggttacgaaacaccgcgcgcattgacatcggcagaaatcgaggccactattcacgattttggtcaggctgtgcgccgcgccatccttgctggttttgatggcatcgaactgcatggtgccaacacctatctgatacagcaattctattcgccaaactctaatcgccgaaccgatgaatggggcggtgaccgcgataagcggatgcgttttccgttggcagtcgttcatgaagcagaaaaagtgattgccacaattgctgaccggccatttttgttaggctaccgcatttcgccggaagagttggaacagcctggcattaccttggatgataccttggccttaatcgacactttgaaacaaaccaagattgattacttgcacgtctcccaaagtgacgtttggcgaacctcattgcgcaaccccgaggacacagccatcatgaatgaacaaattcgtgaccatgtcgccggtgcttttccagtgattgtggtcggtggcattaaaacccccgccgatgctgagaaagcggcagaatcctttgatttggtcgcgattggtcacgaaatgattcgcgagccgcactgggttcagaaggtcttagaccatgacgaaaaggcgatccgttaccagatcgcccctgctgatcttgaagaacttggcattgcgccgaccttcctcgattttatcgaaagtatttccggtggggcaaaaggtgtcccgttaacaactgcgcagtctgtgacatcaagcaacgtgactcaagattaatctagcatttcaaatcatcgtgcgagtcgagctgtaaaaagctcggcttttttcttgccgtcttcaacttacgcgatggtgcctgaagctaccagtgatttataagttttaaatcaaggtgtgatcatcacctactcacgctctgatttaaacgcgttcgctggcgcagctcggctatgcgaagaacagtgacacagatggtccaaagcccagaccatctgtgtcactgccacttcgctacgccgagctaaccgcgccagctcacgcttttgtcatttttaacgggtcaacccatttatcaaactgcgctgctgtgacgtcgccgcttttgacggcggctgcttttaaatcgaggttttcttgctcagccaattgcgcgatggcggcacttttttcgtagccgatgtggggtgcgagggcggtgaccagcatgagcgaatgatcaacgagtgctctcatatgcggtgcgtggatggtcaagccggcagctaatttttcagtgaaactcgtgactgttttggttagtagatcagctgactctaaaaaggtactgatgataaccggcttgtagacgttcaattcaaaattgccttgtgacgcggccaccgtgatcgtcgtatcgttgcccatgactcgaacagcggccatggttagcgcttcggcctgtgtgggattcactttgcccggcatgatggaactaccaggctcattggccggaatgcgcaactcgccgtatccagcacgtggaccactggcaaggaagcgaatgtcattggcgattttaagcagatccgccgctagcgttttaatggcaccatgaacaacgctaatttctgagtgtgccactaaagcagcaaacttattggttttcgccgaaagtggtaattgataaacatcgctcaatcggcccgccacaatcttgccaaaattagggtcagcgttaagccccgttccgactgctgttccgccaatggctaagtaaaaaagattgggctgaagctgctttaaagcaatctgatcatgctccatcatggccacccatccgctgatttcttggccaaacgttagcggcgttgcatcctgtaaatgagttcgaccgattttaacaacacgagcgtaagtgacggcttttgaatacaaaacactgcacagttggttgacagcgtgcagcaactgattcactgcaatagccgccgtaatattcatcacagttggaaaagtatcattggagctttgactgtgattcacatcatcattcggtaagatcggcaagtcggggttgagttttgcagcttggtggctaatgacttcgttcacattcatatttgtttgtgtgccagacccggtttgatagacatgcagtggaaaatctttttgcagtttttcgtctggcaaggccaacaaggcatcgactgctcgcgtgattaattggccttttggtgccggtaaaacatcaacggccacatttgctcgcgctgccgcttttttgagttgcagcaaggccctaatcactggcatcggcatcaatggaccagcctgaaaattatgccggctgcgctctgtttgcggtccccacaaagcgtttgccggaatttcaactggtcctaatgtgtccgtttctgttcgatatttgctcatgtttacctccgtcatcaccatcagaaaaattcaaccaacatgcctatttgcatagacctattttacacgaattcgcccacggttaaacaactcaagtaaaacaaaaagccacccagcacggctaatcgccgtttagtgcaatattgtttcgacaagttgtgccgcttcggtttgagctttgatagaaccagtggtcagtaatgacaagtagagatggatcggatctgcctgtggtgtcgatataccaccatgcagccgacgactcaccgtagccggatcaactgaccatgtttgaatgatgactgcgcgactatcatcgacacgatgcttgctattggcaatttttaaggttaattccgccttcagtaaacgatcataagcagcctgtgagacagcataaatcaacggttggttactgccaaatatcgctgccttaattagaacggtgccagccgcctccaaaggaaagttttcactgaagtcaccgctgattttcagcaactgctcaaactcatcagcagtgtatgtgcgggttgctagaattggcgatgtcattagaccgttatattgcttgaaaagcgtccatggatcatttgccagttgataatgcttatgagtccgatggcgatcggccaataaagcgccagatacctgtagttccaatctagcgcgcttcatgattgttcgactgccaatacctgctaattggccaaaatcttcaaaaaactgccgcccgccgcgaaacgacagacgcttcttgctgccgcttgcctgagaacccagacgatcagcatacataagactgatcagcaaatccgttgcatgtagcgacaacatggctggtgtttctaataactgtgttgacgtgcttgtttcttctccctgtgccatcccatcactcgctttctatattgtttgcctattcatgagactatgaaactttagttcctatgctttctgtcatgacgtgcgccggcttgtacttaaaaaagccgctttgatcaacaaacagatgatcaaagcggctttactagggaaactgacaacgataatgattatttggttgaatgcgtggccgtcttagattgcatatgatctaacccaagaatggcgaatagccaaggatcgtaccccacagattcctcgatcccatcgcaactcatggccaaagattcaaacaaatcattgttcgtcaacatctgctttcgcctctttttcatcggctacagctgcaagatgtgcttcataacgttgattgcctttatacagatcccagatcgtccaagcgagtaacgcgaggatggctacgatcagaacaatggcaatgatgttggccatgttggtttgtgtagccgttggatgatcgccgaagaatccggcgattgaatctggcaggcctttaaggttcagtccagtcaagccgagaacggaaatccaaccgagcactttgacccaaccagtgttcttgaaccgatcgcccatttcgactttactgtttgtgaacatcaacagtggcaacattgagaatggtaacgcaaacgctagaaagacctgtgaattgttcatcaaggtatttaacgcctcatgttgctgaattggcgtgtctctagccgtcaacataacacagacgataactggaatgacggaaataatccgggtaaccaaccgtcgtgcccacagaggcattttcatatggacaaagccttccatgatgacctgacctgttaaggtaccggtgatggtggagttttgacctgatgccaataacgcaaccgcgaacagaattgacagaataccagatttagcaacggcaattaaaacaccattacttaaggttgaagaatctgacaaagcttggaacaagccgaagaatgatggatctttaacggcaccactcttgaagactgcgacccccataaccaacagcaagcagttaacaacaaaggcgaatgacagctgaatgttagaatcccatgctgagaacttaacagcgtgtgccacatcatccgggttcttgtgatcaattttccgcgtttgcgaaatcgcactatgcagataaaggttatgcggcataaccgtcgcaccaataatgcccagtgcgccttggataggactcatgccgttaatcgaaggtgaactagcgaatgtttcaccggttggaatgaatcccttcagcaaagcacccatgttcggatcggacaaagcaacctgataaacgaagaccagtaaaatgacaagaataagagcaacaacaatggcttcgatctttcggaacccgatcttggtcaacagcagcagcaccagcacatcaagcaccgttaccagaacggcgatgactagtggaatgtggaacaacagataaagcgcaatggcagcaccgataacttcagcgatatcagtcgccataatggccaactcagtcaggatccacagcacaatccccaacttcttcgacgtccgtgcgcggatagcctgtgcaaggtccatttggctaacaatgccaagtttagctgccatgtattgcaatagcatcgcaatcaaacttgacatcaggataacggaaatcagtaagtactggaagttttgcccacctgtgatggacgttgaccaattcccgggatccatgtaaccaacggcaaccaacgcccctggcccggaataagcaaaaagcgtgcgccaaaaccctttcccgtgcggcacctcaacagtaccgttaatttcttccaatgacggcccattcgcgtattgaatgagcttaattggatggcgcttcttgtgatcatcactcacaataactctcccctttcgtttgaaaaaagttaagtccctggggaacaaggccttttaggtctccctaacttaatcctttcttaggatatgcctgtactgatatatcgtcaaccgttttatgaaaataatttgtgtttttaaaggaaaaattgtgaaaatgaccatacaagttattgctcataattgccgttattgttaaaaagtcactagtgtgaggatgttcaaacgtctttttgaaaaatttatcgacccatcaggtttttcaacttttctgcaaatgctagtgtccccataaccgccattaacaaattgtttgcaaccggtttaggcataccatattatatagttagcaacaaaaaatttatattatgaaatgaggaatcatgcatggaagaagttcctgactcgcaaccacctgcgtctgcacacagtatcaaggacctgcagcaatcgttgcaggtcccgtcccttgaccacggcctttctaaagaagaagccgctaaacgcctgaaggcgaatggaccgaactcaatcgagtcgcatccaacgccaaaatggctaatttttctgcgtcagtttaacaatctgatcatctatatcctgatcattgccgcgattttgacaaccgtgataggtgatgtgaccgatacctcagttatcgttttggtcattatcatcaatgccatcatcggctactatcaggaaagtaacgccagcgattccttggaaaaaatcaagaaaatgctggctcctgaagccacagtttaccgtgacggcgaacggcttgatatccctagtgccaatcttgtggtcggtgatgtcgtcttccttgaagcaggcgataatgtcccggctgatttgcgcttagttgatattgataatctcaccattcaggaagctgtcctcactggagaagccaattccgtcatcaaaaccaccgcaacattgccagctgacacgccattagctgaccaaagcaatattgcgttcgcctccactgccgttgctggtggcagtggcatcggcatcgtcgttgccaccggccatcacaccgaattcggtaagatttcccaagcggtatcggatgtccgcaaaggccgctcgccgatgatgcgtgaaattgacggcatcggcaaaggcatctcctatgcgatcattgccgctgccatactgttgttcattttcggcctcgtcattggcaaatacagtctgccggttctcgccttagccattgtcacgatggtcgtcggctccatgccagaaggtttgccagccaccacctcggtcatcttggccatgggcgtgtccaacatggccaaaaagcagcatgtcattgtgaaaaccttgccagctgctgaaacgcttggctcagtggatgtcatctgtaccgacaaaactggcacactcaccaaaaacgagatgacgattaccaccatcgtgacaccgcaagcaacctacgatgtcagcggtaccggttatgcgccgactggtgacttttcaatggctggaaaagtgattgatccagctgaacatgccgatttatcagcattactgactgctggatttgaagccaacgacacggaattgcaccaagaagacggtcgttatgtcattaatggcgaacccacagatggctcgtttctgactgcctactacaaggctttcaaacaggaaccggcgaacaccgagcgcgatctgatgccatttgattccaacaaccggtacatggcgaagttagcaaaatgtgtcgatggccaaacgagactatttgtcaaaggttcccctgataaaattctaccgttagtcgccacagcccatcctgattttgatcaagaccgctacttgaaactcaccagccagttcagtgtccaaggccaacgggtcattgcagttgccgaaaaggtagtgccaaacgccacaaccgaaattacccctgaactgctcagcgaaggacttgattttctcggcatcaccgcgattatcgacccgccgcgtgagtctgtcatcacggccatcaagcaaatgcgccgcgctggcgtgaaggtgaaaatgattactggtgatcatccagaaactgccatcgcgattgccaaaaaactcggactggctgattccccagaagcggtcaccggtgcgcaattggcgggcctatcagatgaaaaacgtcgacaattgattcttaatgctgatgtttttgcccgaacgacccctaaggacaagctgaccatcgtctctgtgctgcaagaagcaggcaatgtcacggcaatggtcggtgatggtgtcaatgatgcgccagcccttaaaaaagccgatgtcggcgttgctatgggccagtctggtactgatgttgccaaggatgcagcggatatggtactgaccgatgatcgctttgctcgcatggaaactgccatcgcgcaagggcggcggatttacgagaatatcaaaaagagtattctgttcctgctgccgacttcatttgctgaaggcttggtcatcgtgttcaccattctgacgcaacaagaaatgccattgcgtgccagtcaactcctgtggatcaacatggtcagtgctattacgatccaatttgccttcattttcgaacctgcggaagccggcaccatggatcgaccaccacgtaagaagaacgccgcgatgatgcataaacacgatgttttccaaattgcttatgttgccatgttaattgcaggcataggcttgtgggcgtttgactggttgaccgccaatcatctaaccgatcgcacaacggcaagtaccatgatggttaacatgattgttttaggtaaaattttctatctgtttaacattcgcaccaatacattggcactctcaaagaacctgttcagtaatcccatggcctttgccatcattgggatcatgctagcattgcaatgcttcctgacctatgtgccgtttatgcaagacatttttcaaaccgcaccgatgtcttggcgtgaatggggactggcgatacttgccggctcaatcattctcattgtgactgaaattgacaaaatcattcggatccgccgtcagcgtatgcgcggccatggtgcctttcggtcagtaaccaaaacacaaggataatgtttggcctccctaatttttttcttccaattttggattaatcatggtaatactataagtaaggtttccctaacaaaccttatgcgtatttagaaggcctgacagccagatcgaccatcactcaagctgtcaggctttttgaataccttttttcttttaaataaaggcattatcagttgagcagtcccgaatcctacttagtcacatcactaaaaattatttcaggcttacctaatatttctcttttaaatatcatcataactgctatactaaaagtgaaaagaagaggagtgatcgttttgaaattgtatcaaagccttacacaagtccaaatcaacgaacaattcgctggtcaagcaaccggctacaagctttccacgacccttgatcagccgctgaactacgatccaacgattctctatcagtatttggataccgtcctgaaaccgggcagtcgccacgacgaaaacaacttgcgctacgtgactgatccgggctatatcggcgaaaactttaattaccaaagcgtcccgtttacttcgcacatgaccgaattcgacgagaagatggccttcgcacgcaaactggtggccgaccttaatcgtcatttatctgtcaacatcaaaccagaagatgaaactatcgaactggtctttgttgactaaagcaaccgtgttaccctcctttcctagtcgcgatgcttctctcctgatcatttgcggctaagtacccagtcaagcatgcttagttgcaacaaaaatgaccgtctactttttagtaggcggtcatttttttagatgcaaagcacgaattcgcagctataccgctttcttcgcgacttcctttggtaacgttaacgccaacagcaagccaatcaggcccacgccagcaaacacagcgaaggtaaccgcaaaaccgccagcatgacttcgcagcgtggtttgcatgccatccaacaacactgtggcgaacatgacaccggcagacccaaacaactgccgagccgtcgttgtaaccgcagtgccgtctgccacgagctcattcggcaaagcattcgcgccagccgtcactgaaggcatcatcacaaaggcgttgccggcttcagtcgccatcgccaacataattgccccaatcagcggtaaatgatgggcaaagactgctaacagaccaaagccgccagtaatcaacaacatgccaatcatggccacgacacgcggtccaaagcgatccagtaggcgcccgctaattggattcaaaatactcagcaacaccgcagctggcactaaggacaagccagaaatcaacggtgacaaaccaagtagcgtttgaaagtaaagcggcatcaggatagtggtgacaatcaaaccgacgtatgaaattccggtcagaaacaccgctttagtaaacataccagtggcaaaaactcgcatttgcaacattggtggttggcgattcaattgccgaacaacgaaaataccagctgccagaacgcctaaaattaacaaaccaaccacgccaacagttaagccttttttcgacaaagcacccaaggcataaagtagaattggaaaacttgcggataaaaggaaggagacccagtccagttgcgtcggttgcaatggcatgacagacgcaatggtcaccgttgaaacggctagcacaagcagcgaaacgaccaagaagaacaagaataaagcctgccaagggaaccatgtcagcaaaacaccggaaataatcggaccgactgccaaggctgagcccatgaccaatcccgccgtgcccatcacccgaccacgctcactatgcggcgtaattgtcagcaacacggtctggaaactcgggaaaataatcccgaccgcaatcgcttcaagcaaccggccaatcatgagcacggtaaaactcggtgcccagatacataagcctgtcccaatggcaaaaatgagttcaatcgcttggaaaagccgttggaaaggtacattatgcaacagccatggactaaccggaatcatcaaggtcatcaccaacataaagccggtcgtcagccaagcaactgtatccgctcctaaaccaaaagctttcataaaagcaggataagcggtgcttaaagaagactgcgaaattgacatcgaaaaggtacctgtcagtaacgtggcgacaaaagccccgcgatgtttgatcgttggagagtgcatattaaaatcatctttttctatattagtattgtgggacgtttacattttcattcccattttttcataagactgcataccgcccatccaaatctcagatggtttgacgccacgttctttagccaaggccatcattaacgtatccatatccatcaatttatattcttgctttggcttggctggatcgaaagtttcaatctgtgccatcatgccgccatcttcgtgctcaatgatatgacagtgatacatgtaaacccctggcagatcaaagcgcaccagcagccgaaccgtttccccaggattcacgccaacggtatctttgaaaccatgttcatttggatacggcgcatgcccattccgcgacaagactaagaattgggttccatgcacatggaatggatgaaccattccaggcgcatcattgctattggtaacatcccagtactgggctttgccaattggttgcgtggcatcaatccgctgcatggcaaactttttaccatcaatcgcaacaccttcgtccatcccctgcatcacaacgtggcgaactggcaaagccggatcaaccactggtgccttcacatcgaacaacttatcaggcaaggtcgtctgatccggtttgaacgcatgaatgcggaattttagcaatggcacatcatccgtatataaggtgacctcgtcgccttcatggtattggccaaaatcaacaatcacttcggcacgctcagcacaagtcagcatcaaatgggtaaatttgaccggctccggtaacagcgagccatccccgccaatttgcgtaaatggcaggtcatcggaaaaatgcaaccgccattcacggcgattagcaccatccagaaaacgcaaccggaccttttgcgtggtgacatcaaaatagggattaattgtaccgttaatcattgcggttggcccagcaacaccgtcaggatcataatcagcccggtagtcccactggttgttctcgtgaaaacgccggtcttgcaaaatgaccggaatatcgtcaacgccatagttccttggcaatggcaggctggcttcatggtcgtctttgacaatcaccatggcagccaaaccatgccaaacctgctcggctgtggatgggcacggatgcgcgtgcagccacaaagtcgtcgccggttggtccaacgtgaagtcgatatgcttgctttcacccggataaaccggcgcatggcatccgccatcaacataagggccactgacattagccccatgccaatgaaaagtggtcaactcaggcaaggtgtttttcagtgtcacgtgcgtatgctgaccacggcgatacacaatcgtctgacctaacagactggtattatagccccacgtcttggtcttcgccccaggtaacagttgcgtttccccagcctctgctgtcaccgtgtaataaacgtcggtcgctgtctctttatccggtttcaacaacggcggcacatttaagggcttctcaggcgcatcactgacctcaagcggcacgtacccgccatcgtggagatcaaacgctggctcatcaaagaaatagtccgtataggttttcatcgtgatttcccccttcaaacgcgttctcagccgcagaaacctgcacataaggaccacaagcgcaatggccaaagtgcggccatcgcacttgtgcccgcttatgctccggtttctgaccgcggctgatcacgctctgactagaattttaacactttttagggttgccataaacataatttagaattaatctaaagtagtatcgaaaaatggtataggtcttatccatacacttgaggaggattttcatgcaacaaatgtcgaaaacaatgggctggctcatgctggcgttaaatgtggtgctgctgattctaattggtaccatgcacaatatggcagcgatgtggttaatgggtctgattatgactttggacgctgtgaccgggttagttgccgcttatcggccccagtcaagtcaacaacacgcccaccagcactagtttgttaagaagttgctgcaagacctttcatggagtcattgatcggcgttatatgttgacatatacatatgttgaatatatcatgtgtctgtacttagatgaacagtcacatgaaagagggtcgtttaatgcagcaactgtcaatgacgcagaaacaaaccatgacgtcagccttacgggttgaatatttttcaacggcatggatggcatttgagttcatagtcggtttttggtccggtatgcaagcaggttccattctcttaattgcgtttggcctcgatagttttcttgaaattatttctggcagtgccctcatttggcgtcttaaaaaagaagccaatggtgcgccatctgcggaggttgctcaagcagagcaacgttccagtctcattgtcggcagtgttttattattactcagtctttatgtcattggcgtttccggctataatttggttacacatgccgcagctgatacaagttacagcggcatggcaatcgcaattgcttccgtgttcctgatgcctgttttgaccattaaaaagcggcacttgggagaaaagttaacctctcccgcgctgattgaagatggcatgtgcaacatcacctgtgcttatatggccgcaactgttctgcttggcagtctgctgacttggttgtttaactggtggtgggcggattctgtcgctgctttagtcttggtttattttgtggctagtgagggctgggaagcgttgcaaacgggattgggacacggtgatgacgcttaactaatggaggtttcggtcacatggacacagacactttggaactggtcacgacagctaaattgactgaggcggaacgcatttttaagttattgagcaatccgattcgcctacagatgttaaaactgctcgaacaacgggaactgaatgtcggtaccattggtgacttgttaggtttggaacagtcggttgtttcccaccagcttgccttgttgcgaaagcaccagctggtgagcgccaaacgggtgggtaaagccaatttctaccgcctcgatgatccgcatatcatcaccgtcatcgatgctatgctcgcccatgccgaccacgtggctcgcggcaagcgacacggcgaataatgcaacaatgggtttgcagtcggagaaggctacgagtcagccataaaaaaacgttacctttaccattttcggcaaaggtaacgttttttttaatggttcaaacgagcgtcttggtcgcgattattccgccaaaccgtcgtgaatcttatctaggttccatttcatcatgctgtagtacgtatcgcctttggtgccttttgctgccaaggagtcggtaaagattttggcgtgaatcgataggccggtttctttagcaactttgttcatggacttcggtgaaacagaactttcgacaaacaaatgcttaacatcggaggcgcgaattttcgctaaaaccgtctgcatctgctcaggcgtaccttgggcttcggtgttaatttcccagatataggccggtgtgacgtgataagccttagagaaatacttgaaggcgccttctgatgtaacgagcaaccgctggcgttccggaatatcaaggaactgagattgagcggtttgatgcagtttttgcagcttagcaacgtattgatctgcattcatctggtaataattggcattcttggcatctttttgcttcaacaccttggtgatggttttcacgtattgaatcccgttggccagatcaagccaagcgtgcgggtcttgttccttcgtattggtcgtcaggtacatcggattaaccccgtcactggcagcaaaaacgtctttgttaaaagctttatgcgatgtttgaactaactttttgaaccaaccatttccgccagtttcaaggttgaggccattgtggaagacaacatcggcttcactagtggcagcaacgtcggtcggtcgcggttcatattcgtgcgggtcggtgccgcgcttgacgatactatagagttcaatgcgatcaccgccgacattgtgcaccatgtcttcaagaatcgagttggtggtgacgacacgtaattgttggttagtacttgctgaatctttctgagtcgtactgcggttgtttacaaaccagaaaacccctgcaaccatggttaaaacagcaacaacactgattagaatctttttcatcgaacagcctcctcggcagtgtgggtagcagcagcggttttcttttctcgttgttttttactgaaactgaagaacgcctgcttcggtgagaagacgaaggaaatggcgaacaggaccgcagctacgagcacaatggccggcccggatgcccagttaaaggtgaaactgaagtaaagtccggtgatggccgagaaaacgcctacgctagcggacgtgatcaacatcgtttctaaccgatccgtccacaagaaggcagttgctgctggcgtaatcagcatcgccacaactagaatgatcccaactgtctgcaaggctgaaacggtgacaagcgtcaacaccagcatcaaagcatagtggatcatggtggtattcaagccatacgttttcgcaaacgtattatcaaacgaggtgatcagcagttccttatagaacagaaccacgaacaggatcacaattcccaacacgacagcggtggtgacaatgtcgctgtcgctgacggctaaaatgttaccgaacagaatatggtgcaagttagtcgcactttcagccattgaaatcagaataaaacccaaggcatagaacgcactgaacacgaccccgatagatgtgtcggttttgattttactgttggctgccacaaatccgatcagcaaagccgcaataattccgaaaaccgatgccccgatcatgacgttaataccgagcatataagcaacggctaccccgggcaggaccgcatgggaaatcgcatcccccatcagcgacatgccgcgtaaaatgatgaaacttccgatcaagcctgacatgataccaaccatgatggcggtgatcaacgcactttgcaggaaatcatattttcccaaagcggtaaagaattccattattgatgtcatacgcgcgcaccctcctttgccgtaaacaagacggacgacaggtcggctgaaaatgcccgttcgatattttgggcggtgtaaacttccttgaccgatccttccgcaacaatgccgtggttcatgaccacaagttcgtcaaaatattttgaaactttattcagatcatgatggaccacaatcagcgttttaccggcatcgcgccactgattcaaaatcgtcatgatctcttgttcacttttcatgtcgatccccacaaacggttcgtccatgatgataatttctgcatgttgcacaatcgcccgcgcaacgaaaacgcgttgcaattgaccacctgataactggttgatctgacgtttcttaaaatcctcaagaccgacttgggtcagggcgtcaagcgccgcctgtcgttcctttttgccaggacttttcagtaagcccaatcggccatatgtcccagtcagcacaagatcttgaacattgatcggaaacgtcagatcaagatctttacgttgttcgacataagcgattgactgctgtacctctttgagtgtccggccggaaaagtcgaccgttcctgattgtaccttgatcaatcccaaaatagctttgatcaaggtcgatttacctgctccgttaggcccaatgattccggtgatcttacctgcgttaaaatgaacggcaacatcagcaaacaccggtgtgtcagcgtaggcaacggtcaggtccttaactgttaacataagagcctccaatttttagggtgacctaattcgctttcatcttaagcttacagaaaatttcaaatgctatcaagtgttttttaaggcgaacttaaaaaagctaaagaacatgaaccagtgactatcacgaatctaatgcttaaatggcttacttctcgacaactgccgtagataaaagtatgtaatcgcattcattcataagcgctgaacatcatcaaaaaagagaaccatgatcgagataaatgctcgctcatggccctctggttatcgcctagttattttaagctttctgggtgacgctgtaaataaatgacatgtgtgttggtaaattcttcaacaccgtgaataccatcggcgcctccgacaccagattgtttccaaccagcatggaagccttggatgccttcaaagttgaatcggttaatgtaggtctcgccaaactcaatctcgttagcaacatacgaagcggtttccagatcacgcgtataaacggagctggtcaggccatataccgtgtcattcgccatttcgattgcttctggaatgctcttgaatgtcaaaatcggtaacaccggtccgaagatctcattttgcacaatctctgaatcctgcgcgacattggtaatcacagttggttcgtagaagaaaccaccgtcaatgtcagctgggtgaccacctgtttgaatctggccgcctgcttcaaccgcccgctgaaccaaaccgtccactttatcaagggcgccttgattgatcaacggacccatttcggcatctggatcagtgttcggattaccgactttcaccgccgccatcttggccgtcattttcttaataaactcatccgcaacatcttcttgcacataaatccgttcagcgttgttacaaatttgcccattgttatcaattcgcgagtcaaaaatggcctgcacagctaaatcgatatcagcatccttagcaacaattgccggtgccttcccaccaagttccaatgacatctttgccacatgattcgccgcagctgccatgaccttcttaccggacgcggtggacccagtcaggctgataatgccgactttggggttcttcgccaaatcatccccaatgatggacccgcgaccactcacaaagttggctacccctgccggcaaaccgacttcatcaaccagttttgcaaatgccaacgccagtcctggggtgtccgaacttggtttgatcacgatggtattgccggttaccaaagctggccccattttccgagcaatcaggaagaacgggaagttccaagcaataataccaaccgcaacaccgattggctgacgggcaatgataatattttcgttttcattgtcagattgcatcacatcgcggaataaacgcgtgcggcgttggccatatagtcaaaataatccgccgaaaactcaatttcggttttcgctaaggcatgaatttttccttgctccaacatcagaatcttcaccagttcatcttcatgctcacgcactaaagtagcaagcttgcgcaagtacgcaccacgcgttggagcaggcacgcgccgccaagcattcttagccgcccaagcagcatccacggctgcgcgggcttcctcaattgtcgctgccggtgctgtccacaatttcttgcctgtggaaggatcgatcacagtttcaacatcgcctgatgccgaatccatgaacttgccattgatatacatctgatagtgcgttgactgcaattcagccattgtgtttttcctccttgcaaacgtcttttctgtccgacgaacataagcaaagccactttgctcacgttatgtaagcgctaacttcatacatcttaagtataacgtcatcttcaggcaaaagacatgataattgcttgtgagttagcaaacatgaggaaataaaaaacacaaaacgaattcatcgccggtggcttcaggtttcaccaactggctttccgcaccccaggaatttgacctttatgggcgagttcacggaaattaagccgggacatgccaaacttccgcatataagcatgcggtcgcccatccaaaacgtcacgatgatgtaaacgaactgggcttgaatcacgtgggagtttgcttagaccaatatagtcacctttcgcttttaatgcagcgcgctttaccgcgtattgttgaacaagtttttcttgtcgttttgcttttgcaattttagatttttttgccaaaagaatgcctctttccttcactgatggtctttaatctcccgcaaacgagtcactcaaagtattcaaatgaccaccaattattgatacattaccgatttttctgttgcttacgcttagcatcgtgcaaaacttttaacgcccgttttcgggtcttaatgttgggactcttcatacgccgccgtgcactggcaagatctgtcttttccaaaaatgatcacctctttttaattcgtaatcattactatttaagcaacggcagtaaccgtatcacgactgcgatttatctgtcaattagaatttaagaacgacacttttctcaatttttttgaaaattttccttgccagaccgctcactttgctttatggtttaaatcgtaattattacgttttggaaggaagcgggaatttatgatgaagcgattacttgcaggtatcagtgtcgcattgctggcaatttttgcagtcgcatgcggtagtaatggtgccgcaaagcaatccagctcgaatggcagcaagattcaagttgttgccagtcttgatttttatggtgaggttgccaaagctgtgggtggtaacaaggtgtcggtgcagtcgattatcaacaatccggcggttgatccccatgactatgagcctactaccaaagttgggaaatcagttgcgtctgccgatcttgttgtcgccagtggcattggttacgacggctggatggataaggtcgtgaagtcggcggacaaatccaaaaattacttacgtgtcgctgacgatttgatgaataaaaaggaaggcgacaacgaacatatctggtacgatccgcgaaccatgccaaaactggccaataccttagctgataagtttgccaagaaagatccagctgacaaagcgaccttcaaggcgaatgcaaagaaatacatcgcttccctggacaatctcaatactttgatcaacaagttgaagtcgaaagtaaatggccaactcgttgatgtctccgaacctgtctttggctacgcgctcgattatctgggctacaaagtcaatgacgatcacttctcgaagtcaaccgaagacggcacagactacagcgcaaaagatatccatggtatcgaaaccgatattaaggaaaagaaaattgccttctttgtcaataacatccaagcaagctcaaagactgtcaatcaactcgtcaaattagctgaacaaaataatgtgccggttttgaaagtgaccgagacattacctaaaggcaaaaactatcggacttggatgaccagccaataccagcaacttgaaaaaattcaggatcaagcaacgaacagcgcaaaatagcatcacttctggtcacaggggtttatcattcccccaatgtttcggcaaagctcaccctctgtcgaagtttcgttaattgctttgatgacaagataaaccatatgcccgggccaacaacaccggacagcacttgaccagaaggaagcccgcgaagaaattcgcgggcttttttgatcgttccgcccacaaacaccggtgttacaataaagctgtattgggaacaagaaaggaagattcaaatggcaaatgtcatgatcttaggcgcacacgggcaaattgcaacgttggcgcggcatcagttgctgaaagaaaccgatcatcacctgagtttgtttctacgcaatgccgggcggctgcaagacgtcaatccgcaacgggagacggtgattgacggggatgtcaccgacaccgccaagttgaccaaggcgcttgctggcattgacgttgtctatgccaaccttggcaacaaggggattgaagatcaggcaaaatccgtcgtgaaagcgatggatgctgcaggtgtgagtcgattgatttggatttcgacgttgggaatttacgatgaagtccccggcgcttttggcaagtggaatcatcaaatgcttgatggtggttatcttgaaacctacgccgcagccgccaaagtcattgaaaattctgacttaaaatatacgatcattcggccagcttggctttccaataaaaacattatcagttatgaattaacggaaaaaggcgagccatttaagggcacggaagtctcccggcgcagcatcgctgacttcgtcgtcaagctgattaacgatccaagcaaacacatcggtgcttcacttggcgttgaccaacctaacacccaaggcgataaaccttccttctattaaagtaaccagtcatcggccaaatcaaaaagagtttatttccgtgttcatcactgggaaataaactcttttctgttgccatgccctttacttggctatcaaagtagtatctttttaaactcaatcaaactttgccatccagtgactagccgtatgtgcgtcaaatgccatctcaatgtcggccggcaaattgcgttgtagcgataagggcacctgaagcgcttgttctcgcgtaaaaagttgaacctttgcagtttcgatcccgctttttaacgcacgattctccggtagacaagcaatgaacattttgtacacatcttgcgaactttgcttggcataggcgtgcttacgtagtgcccgaactgccagtaattgttgcggtttcacggttaagccggcctcttcacgggtttcttttacagcaatttcacccgcactataacccaaatccgcccaaccaccggggatggaccatgtaccgcccgctcgttcctgaaccagcaatagttgatcgtcaataaaggtaaccgcacgaacatcaactttgggcgtcacatagccaaaatccgcatcgacaaacagctttgcttgctggtcactggcaccaagctttattgccagcttagtcgtcacgtcagccagttctgtataacgctgctgatcaaaaacatcctttgcgttatagttacccgtctgtgcaattgcctgcaacttggccagcaaagtattcaaatcatcttgatagggtgccaaacgatcgcctcctcacgtccaacctaacaaatcagcgcgccatcacctatcacaaccccgtcgatttgaaaaagtcttacgtttcaggtcgcctgacgctgtgtaacaaaaaaagcagtcatcaactgccttttgcgatcctatgtaacttgattgttacttcgagcttccgctatttgtcaccgcttgctgattgttcgcatagttgcgcacggattccggaacttgaccgccgaaagactgttgaccaatactgacggcctgcttaaagaaagcttgagcgcttgactgatagccttttccatcattgttaataacggctgtcaacacgtcacttgattgcttggcataatcaaccaatgtctttgccaaagcatcatcccctgaatcctgtgacttgttattatccaattccagccggatcttatcaagtttagagagactggctttagccgactgactgagggttttgttatcactttgcagtgagacctctgtcatcgttttcatcaccaagtcagaaatggtcgtataccgtttctgcaaagtctgcttggtaaaatggttcaccttaatcatcgtcgacccagtcgagctagacgactttgaactttttgactgacaaccagttacaccgatcatagccatcactgatactgcaataacaagccaccttcgcaacttgatccctccccaacatgatgacgaataaccgcatcattaaattaattcaaacataagccgttcgagacgtcaaacatttcaccagttatttgatccctttaaccaaataagctaagcatcattatttcgttatttttgtaagtattatctcacaaaaatcgccttactaagcaagggaatattcattatatttgttaatccgaataaatatccttatgttataattattttgttaaattatgactaaggaagtgccgagatgcaaaagcgccgccactcacaaaagcgtgcttcagtctttttacttatcaccttgttgttgtcagttctggtgccttaatcccaccgctcataagcaagccgatcagtgtcggtgctggccagaatatcgcggtcaccggttttggtagtcaagatgctacgattactgacaccactgggaaagatttcacccacgcacccaatctttcgatgtatagcgtgtacatattaacctatcactggcgaattcctgacgaagtggtcgtcaaagccggtgataccgcgacagttttcctgccagcaacggttgtatcgcgagccgatgtggactttgcagtggttgatcccacaactggcgccacgattggccatttcttttccaaagcaggtagttcatccggcattttgaccttcacggacttcttcagccattcaacagttggccgtcaaggtgagcttcaattcatggtaagtggccgctatgatgatagtggtcatcaacgtccaggatggtatatcaacaaagccgggtgggttgtcaatccgccaacaggtgcaactccagaagaaaaagcgcagtatgttgatgaccttggtcgacccaaaattttccagtgggagattacgattaatccaaatatggaacatgtcgacaatgtggtgctcactgatacacttggtcccgggcagcattttgatacaagtcgtgggctggtcgtccacactggtacttacgatgacaactggttccatgctaccggtaccatcaccccaagctatcaagtgaatggtaaccaagtcaaaatatcgctgggaacgatcacaaccgccatccaaattgatttgtggactaatcccacctctgcaagtttcgaaaccacagattcttggacgaattcagtcgttgcttcaggcaagcaaggcggtaccggtgctccagcgcaagcaaacggcacaattacttggcgtaacggcggtagtggcaccggccaagttggacaggtcacgctaattaaacaagaccagaaaacacatcagcaggctctcgccggcgctgttttctcactctaccgtgccgatggaaccttggtacacgacgacctcacgactgatacgaagggcaagttaacctttactcaactcttagtcggccaatactattttgtcaaaacaaaggcgcctaaaggatacaagctgaatgcgactcacttgccgtttaccattacccttgataaaccgcaagtgacggtcaaggcctatgacgagaacctgacgccgccaccggtaacgccgtcgacgccatcttctgaatcttccagttccaaaccgtctgtaccttctagctcggtgacaccgccgtctaaaccatcaacaccttctagttcagtgacaccgccgtctaaaccatcaacaccttctagctcggtgacaccgccgtctaaaccatcaacaccttctagctcggtgacaccgccgtctaaaccgtctgtaccttctagctcagtaacgccgccgtctaaaccgtcgtcaccttctagcgagccttccaagccggctgcttcatcaacccctagccatcaggaaagctcatcttccatatctagcagtgatgtgatcccttcatcctcttcagaaagcgattcttccgcaagcgtggaggttatcacgccaagccacaacaacacccatcatctacctgacacaggtgagcgtgttttaggctggctagccattgcaataggaagtcttttatcaattactggtatccttttattgattaaagattatcaataagcgcgtttcaaaaactgcagcatgacgatgaaatgaagccatcgcctgctgcagttttttgctgctttaaattttgcttgcgtgtacgccatgaatacgctacgcttacaaccgtaaccattacgctttccaacaaaggagcttttgcccatgttcaaacgattattgaccgccttcagcgtcatgttgttggcaatccttgctgtcgcttgcagcaccagcgccaaatctggcagcaaccaaaagattcaagttgtggctaccgtcgatttttacggtgaagtagctaaagcagtcggcggcgatcaggtgagtgtccaatcgatcatcgacaatcccgccattgatccccatgactacgagcccaccactaaagtcggtaaacaagtggcaaccgccaacctcatcgttgccagtggtatcggctatgatggctggatggacaaactcgtgaaatccgaaagcaagtccaaacaatacttacgtgtggccgatgacctcatgggcaaacacgaaggcgataacgaacatatttggtatgacccacgcaccatgcctaaacttgccaatgccttggcagacaagtttgccaaacaggacccatccaaaaaggccatcttcaaagccaacgccaagaagtacatcgcctcactcgataacctcaatgctttgattcagaaactcaagcaaaacgttcacgatcaaaaagtcgacgtctccgaacctgtcttcggctacgcgctggactatctaggctacaaggttaacaacacccacttcgcccaagctaccgaagaaggcaccgattatagtgccaaaaacatcaacggtgttcaagacgatattaaagaaaagaaaatcgccttcttcgtcaacaacagccaagccagctcgaaaatcgtcgacagtctcgtcaaattagctaagcaacacgatgtccctgtgctcaacgtctccgaaaccctgccaaagggcaaaaattatcgcacttggatgaccagccaataccaacagttagaaaaaatccaagcaaaggccgacaaaacaaactagtctctctgtcctacccccccaaaaccacttcgtcttcaaaaatcgcaacttgcatcaacggatacctctctaaaagaaggtaaaaaatgcatggcctgctgttcattttgtgacaactgacatcttttcgtaaaatttttgcaatgaattcgttttcaaaagccctataccaattgaagttttgcttggcgactcttacaatgtagttgtaaacaggaacaactaataggggagatgttttaaatgtcactgatcaagcatacttttaaacgcgttgagcacatgatcgcagcaccacgcgatccccacgaagaagaacaagcccgtcttcaagaaaacctgttctatacgaacctcagtagtctgcaaccaaaaacgaacgctaagttttgattgaatagatatgaagtgaatgaccgcctcaacagcatgttgagacggttttttaatgccgtccattttgctttaagaatcaaaatgaccaccttgaggagcaaatgctcctcaaggtggtcaaaaaaactttcaggttatgttgttgagcctgtgacggctatgccaactgttttagctttcctaagttgttttcatacggttttttggcggtttaaaccacctccctgttgatacagacctttgtgctgccttctcatggttagtgcaatcccaacatcaactcaaccatgaagacttgtatgttctcttttcgagacatcacaatcatgaccgccactaaggccttcaaaacgcttttaaaccatccaatggtgtttacccacctctgtactacctcaagccatactaaattaatagcaggcaactcaatccaagggttgcacatatcaagccgctctcgctcccaaagcgaaaactcgtgtgatgatcaaagagcaacttacatctcaatgaagaatgctctctaatcaaaccaaatactagctgcagtgacatctgagccatcatcccatgtgatagtccagccgctagtgtaaacagctcattactttgcgtgacgatacttgcgaactccggccaagccaagaaccgcaatcacgacagcaccggcctcagccaaaattgcgcccgcttggctttcaccagttgcaggataggcatgtttgccattcctctgagcaacccgactcatcggctgactacttgaaggctgtgcggcaacaactggaataacagcagcactggaagtcttcgggttagccgcactcgatgctgaggaactggcggcactggacgctgctgaactgccggcgctggatgctgacgaactatcggcactggacgctgctgaactgccggcgctggatgctgacgaactagcagcacttgatgctgctgaactgcccgcactcgatgctgacgagctagcagcacttgatgctgctgaactgcccgcactcgatgctgacgaactggcagcacttgatgctgctgaactgcccgcactcgatgcagacgagctagcagcgctggatgctgctgaactaccggcactcgatgcagacgagctagcagcgctggatgctgctgaactaccggcactagatgcagatgaactggcagcactggatgaagctgaactgccggcactagatgcagatgaactagcagcacttgaagacgatgaactggtggcactggatgcacccgatgatgaggcaccactagaaggcgttgacggcttaggaccgggattcaacgcttcaacctgtttagttaatgcagcaataaatgaagccaaggcactttcttgttgcgtattgaaagcttgaatcttactgctattgtccttttcaacttgtgcttcttgactggcaaactgatcagctaattgttgaactgcattgttcaaggatatcttttgagtttgatatgtttggtcttgaccgtttttgagactctgaagattatcttttagagtttgaatcttttggtcaatttctttgttattgtcttggccagtagaaggcgttgatgtttgtgctggaacatataatatattcgaaccaggataagctttgtaagaaccattagagttcattacccaagcattttgaacagtattatactgaagagaaaagcccatatttacatcatcactaagaagaattccacgatgtccttgaccgctatcctcgtcaaagttaactaaataattaattgcatctgcaactccttgaaatacttccagcatagtttgattatttttgctatacattgtataagccgagaagtcaacagatgtcaaagtctcatctgctccgttactataattaaagatctgattaatgatattagggtcatgatttgtctcagaaacattgatcaaagtttctccacgctgttgaaccttgttaagaaaatcttgggttgtagaaatagctgttaaaccaatagacttacgataattattgactagcatcatagcatattgattcaattcatttttttgtgcatcagttaactgattattacctactacatctcctaaagaccatgatggaacattttcatttgattgagtgtacagattatccatcatgccagcttgacttggatctttgaacacgggaagattctgtactaaataattaccgttccaattgctatcgttatccttatgagtaacaacattagtccacaaaccatgctcagccacatagttaaacgtcccaccattttccaccggcgcatcaggcgtcgtccgctgtgcattcaaatcatcaatctgcgcagtcgcggcttgactcgcagctgcataacttgcatcctgttgagctttcagtgctgcgagactcgcagctgcacttgagctagcagctgccaaagaagcttgatcttgctgtttttgcgctgccgcttggctggctaagctgttggcataagaagcttctgcttcactggctttttgcttttcagcagcttcagagacagctgcgtctgatttggcttgagcatattttgcttgttgtgcctgccattctgcttcggtcatgcctgatgaagccggcatgctggtgttggcattggcggcttgacttgctgcttgataggccgcagttgcttgttgttgtgcagctgccggactggcctcaccgttggctttagctgcgttggctgttgctacaggttgggtgtttttaacagcacttgcaggttcagtttgtgctgccgccggttgactcacttgtccatcttgggtgagtgccactggctgaacgacaaggtgcgtgtctgtttctgcagcattgacaggttgaagttgcgccaaggcaacaccacctaacgctaaggcaaatgcggaaactacgacccactggctgccgcgtttgtacatcttttttctatcattaacaacatgttctttaacccggttatataacatgttacttcctccaataccattaaaattgatgtcttttgattcggggcacaaatttcattatatatatttattaggtatattatgcctaggcaacctggtactggcctttcgttgctggcgttaccgatattgtgccaaaacgggcatccgcaccaaaatggccttgagccattggttattctctagtaatcgttgcatgtcgaaatggtgtcacaaaagtgtctttaaagtcacctgtcccttgaatcttttcaaggttacggtcactgattgacgcgctttgtgcacttacatactgccaaaagaaatcttgttcaaatgcttgtaacaatgacgcaacagttggtcctttctccttcaagcttgctggcagaatgtcccatctttgtgtcagaaacacttgcagtgctggttgccaccaattcttatagcttcggagaacaaacgttggtgccggaatacgatttggctcgtcaagatattgacgaatccgctcgatgacacttgctaaaataaattgtgtggacggtaataacgcaacctgcgcgccacttggtagtgctttgaatgacttttgcttatttgtcgccagttgataagcttccacactctttgcttgataactcgaagtgcttttaatttgtataaacttgataaagtcatctgcattttgcgttcgataagggactaaatcgataaattgaattggatagtgacttaaaatttgctttgcttcgctaacgggcatcgttgtgttagatttttcatctgcatcaaacaaggcccgaagcaacatcgaagtgtgctgcgcataccaatgctgtttatctcgctttgtgttctgtctcagataatccgttagcgtcatgtcgccagtatctgtctcgtttgttcggaagagctgttgataaataatattgttggctggcttaccatctatccattctgcatcctcctcatgcacatatttttgaatgttgacggagccaccctctctttctgcacgaatcaattcctcaacttgtccagatgctaccgctggattaatgttcgcgatgtaaatctgtgccttctgcggatcatgttcaatcggtccagcagggacgccatcataaatcgttgtttcggtttcattaaaattagctcttgcttgtggcttatggatatattgcgcatctgcttcaaatagccagttgaaggatagttcctctgccattgcttcttcttctttcaatttctcgtattcagcaatcttcttttcaagctcaggccgccattggcctttatcttcggtattcggttctcgatatggattcaaatttgctagcatgtctcgccagctctgttcgtctggtttcgtcatagaatcccctccattcatctaggtaaaataactatagtattttaaatgggcatattgcgcctatctaaactaaactaaaaaatttcaccagcaaaaaaggagactgctgaacaggtaacgattttcttgcggtttatgataaaaagtccggcagaatctgatttgacgtcagattttcccggacttttgtcgtatcagggttttccaccctcttacttttcgctcattattttcataattcgctccatattggcataaaagagcgtcatggcctcaatgctattagaccagcttattgatggctatgtttggttttgactgctgcattcttcgcgtcaattcgataccgtaacttgatgatgtcttgaaatgcttgagttgcctgaaaggtcctctgatcttgatgtgtttaagacttaatcgtgacgctataattttttgtctttgcgcctggttgataacacccttgctgccgtggacattcatgacaatgatgcgtgtcaaagtaataagtccggccttgatcgcagctcttatcttttttaccgtctctcgtgactcgcgagtccataaaatctgcagggcaaacaaacataccggcatctttgttgaagttccaagtctggactggagtccttgatccgttgagatgattagatagagctttgaatataactgaaagtgatcacgcttggcaagtttcagttttttccccagacgaggcgatgttaccggtcactttttcaaccctcacaacattttttctattttgattaactaggctttccagaaactgcccatcacattttgacataagagtggcagctcgtttcagttcagtggctgtcaatcaataaattgatgcgactaacaattagcactatgacatccttaaaaataaccgccatgaaatgcaggtttaacgctgctttttagataagacttgaaaaatttcgacgtttatcggtaattgtacggcgttttaaaaataataacaaaaagctcgacatttcgtgtacattgtttgtaggaagctagccccctgtgttgtgagcattatgtcgaaaacaaacacgaggtgatttgtctaacattcaattattaacgaatactgaactctgcaaggtaaacggtggtagtaacgctcttgactgtgctgcaggagtcggtgctagcccacgaaggagactgattttttgaaaactctttccaagattgctcatatcgtcagtgccttgtcaggcgttattttagtcatcaccatcatttccattccaaaatacgacagtatggcactgaatgtgtttattctgacagtctcagcaacaatgattattgataactatagtcgagaatactaagacaaatttttaataaagttccattctctcagaatttcacaaattaaataccttgccactaacaacagcctctactttgcagcaattcgcaagcaaaacagaggctgttattttgcgggaaaagtgtaccttctgtctcaaacacatgtatggccatgctttggttttctgttgttaacgaaagaaaagatgtgcgatggcactttttattgataaggttaagtctcgcaaaattttcggctcacgcgacaacccaacagtgaggttgatatcattttgtctagcgacaccgttgaccaagacgtgatacctttaggggcttctactggaaaaaaagaagctgttaaactgcactatagcggtgatcggctggcacacttgccagttaggcaaaaagtatccctgaagtcatcatccccacaaccaccgctaccagccccgctaccaccgtgccaacataataaaagatcgccattgaccaccgccgatttttaatcaggataaacgcgtctgccatgaacgttgaaaaggtcgtaaagccaccgcaaaagcccggcagtaggaacaaacgaaacgccgaaagcgctggtagtccgactaaaagtcctgccagcaatgaacccagcacattgatgagtagcgtcgccaacggcttgccgggccagaacattttccctaatacggttataccataccggcaaacagcgccgaggccggctccgataccaattaagatcaccattgttttttgtcccttcttccaacgagtttcgaggccaagaatccggctgttgctgctagcagccggcccagcagattgagcatcaacagtagtgtggcataaatcgcatgccttggtgccaaggtcgcaaagtccagcatgagcgtggagaatgtcgtgaaaccaccgatgacacctgtcccgagggcaagcaacagccattcgggcagatcgaatttcatatccaagccataagtggtgaaggccaacaaaaaactgccgattaagttcacaatggttgtccccatcatggttgtgccatcgtgggtcacgccactgatgacatatcgcaaaatgccaccaataaaaccgccagcaaagacggccaccagccaactaacatgtattttttcacgatgatgcatcatgatctcctttcgtgggaacgcactcgctgacgcagaaacctctgcataaacatatcaggctaagatctgtcactttgtcctgagaccatttatgctgcaatttttaaacgcaccagctcatactcaaaaaaaagacacctaccctgatttgctcaaggtaggtgtcatcaacttgcgtataggcgaacaccatcgccatttaatttattgaaagtatagcaaatgtttggtccgaacatcaacaacactgaacgtggtttgtgcatatcttgatacgtacaaaacgaattattattttgttcatatatacgtgatatattaaaacaatgcgtagataagaacattctcctgaaatctaattggtctctcaatggtaatgggttcatcctagtcgcacttacaagccaactgatgatcgctttttcacatcaacaaccgcgctactgctggatcaagttcaattagttgcactgcacaagtatattgaccgcctcacgacctctaaggtataattacggagttgaaaagaggccaccgggcggcttcccgatgacctcgacgcagttcagatgacgatttggtaaaagctaatccttgaggttagcttttttgatgatcgcgtacgctttggccttactggtaatcagtatgctaagcgcgacgataatcgacgccacatccaacgcggcgaaccgctttcgtctcctgattttggcacggctatcacctccgcacttcaaaaaatgttgaggggtgtgcgccacccaatctgctggccaaagaaaaagggtaattactcctctctctaagcttgcttttagtctatagattcccccgaatgcgatcaataagaaaagttgatcttgcgtactcaaattaatcgtcctcttgcgccaaaaagaaaaaagcgtccgctctattcgtatagaagaacaggcgatgatgttcgccgcaaatgattgtgtagcaatctgatgacgtctactgaaacgacttttatgtcgcttcggtaggcgtttttttcgttgttaccgaaaggggaaatagacatggcaatttttattgatacggtaaaggctcgcgaaattttcgactcacgcggcgccttctctaatattgttttccaaacagaataaaaaagtaataacggtgcagttggtctaatgaattttatataatttacgttattttttgtcacgatccgggcaccggaattttcaaaaaatcagaaatgttgtatcgggttaacctcagtatcgttctgcaccagaataaatctaagtataacggtcatcaaaaagcaggccgtttgtgtaaaagccgaacgaaatgtataaaatgtaaaattattgtaaagttattgattcagatattataaaaaagtatgatttgaatgttcaagtgacttgttcgtctcagttcactcttttgcgtcgccgagacaagcaaggttctgcttacaaatgattgattctacttttatggaggaaaactgatgaagttctggaaaagaattgcagtggctgggatggcaaccattgctgcgttatcgctagctgcttgtggtagtaagagtagttctagcagcacaagtacaagcaatagttacacccccaagtcattaaatattcagtttgtaccatcaagcaacgccaatacaatcgaagcaaaagcaaaacctctggctagtttgctgaagaaagagcttggcatccctgtcaaagtcaccgtttcgacagactacaactcaattgtcgaagctatgaagagtaaacaagtcgatgttgggttcttaccacctgatggttacgttcaggcacacgcgcaaaaggcagccgatgttttgttgatggcgcaacgatttgggatcaaacagccaggtgggaaaagcaccgacaaactggttgattcatatcgttcgatgattgttgttaaaaaaggcagtagcatcaaatcttggaaagatctcaagaataaaaaaattgccgttcaagatgttaccagttccgctggctatatttggccgattgccgaactgtcccaaaagggtctcgacattgttaaacaagataccttggttactgtcaaaggtcacgatcaaggtgtcatgtcagtgctaaacggtgataccgatgccgcctttgtttttgaggatgcccgcaatattgtcaaaaaagatgtccctgacattatggacaaggttgaacccatctacttcacaaagccaattcctaatgacacgatttccgtacgtcaggacatgagtgccgccttccgcaaaaagcttagcaaggctttcatcgacattgctaagacaaaagaaggtcatgcgattatctcaagtatttatacacatgagggctatgtcaaaaccacagatagtgccttcaacattgtgcgtaagtatgacaaaattgccactggtgaatcaaaaagcaagtaaagcaacgttgcaaaagcgctagccacctagcgcttttgctatacatggaggaagtttgcatgtcagaaagtaaccacccagttattgagtttgaccacgtctcaaaaatctatcctaacggtgtcgtaggccttaaagacatcgatttaaccattaatcaaggcgaatttgtggttgtcgttggcttgtcaggagccgggaaaagtacactgatgcgggccatcaatcggcttcacgacatctctgaaggcgatgtacgtattgatggtgtttccattaccaaagcaaaaggcaagaaactattgaatattcgtcgaaaaatcgggatgatttttcaaagttttaacctagtcaaccgctcgtcagtcttgaagaatgttttaactggacgagtcggctattatccaacttggaaaatggtactaggtttattttccgctgaagacaagcaacgtgcttacgatgccttgcggacagtagaattggaagataaagtttatacccgtgccgaccaactttccggtggtcaacagcaacgtgtggcgattgcacgtgcccttacgcaaaccccaacgattattctcgcagacgaaccgatcgccagtcttgatcctcaaaccacaaaacgggtgatggatgacttgcggcgaattaaccaagaaatgggcattactgtcgtggctaatctacatagcgttgaggttgctcaagcttatgctactcgcattatcggtattcgggcggggcaaaaagtgtttgacggtccggttgccgaagccactgatgaaatcatagctagtatttacagcggtaatgagcaggaggtgtcataatgacagctcctacgttaccgaaacgtcagctgcaatggcgcaagtggctgctgactggcatcatggtacttggtttaatttggtcgattgggatcaccaatgcaaatctcgggttgtttttcaagaatttcagtcaattcactgtcatttttaccgaaatggcgcatgttgactggagttacgcttattacacaatcgatccgatgattcagacattgaaaatggcaatcattggcaccttgattggctctgccgttgcttttccatatgcccttttagtttcgcgcaacattgtgactaataaaattgtggtaggcatttttcgctttgtgctcaatattgtccgtaccatccccgatctcatgttagcggcactttttgtcgccattgtcggaatcggaccagtggccggtatttttgcgttagcgatctttacttttgggatggttggcaagctgttttatgaagcagttgaaacgattgatcctggaccgcttgaagcacttaaggcagcaggtgcaggccgaattgaaatgattcgttttgcagtgttgccgcagatcgcaaattattttgttagcttcgtcttgtatgctttcgaaattaacgttcgggctagtacggtgctcggctatatgggagctggcgggatcggtatttacttgcaacaggcattatccatgtttcggtatgatcgggtcggtttgattgtgctagttatctttgctgttgtacttgtcattgactacattagcggtaaggctagggaggtgcttctatgaatcactcagcttcattgccaaaggcccccctgcaacatcgttggcgcaattggttactgacaataatcaccttagcgattatcgtttggtcattcacaggtatgccaagtcttgaaatcaaacccaatgcgtgggtcgttaccaagtcaatcgctgcggggttggcacatcccgattttagctatgtttggacaggtgatggcgaagatctgacttctacgctgctgcaaactttggggatcgcctttttagggacgttcatttcagctattattagtctgccatttgctttttgggctgcgaacacacaacacaagttttggctgacgactcgttctggcaaatttgtcttgactgccattcgaacttttcctgaaattgtcctggcgttaatgtttatcaaagccgttggtccaggctcttttgctggcgtactagcagttggctttcatagtgttggcatgctcgcaaaacttttttccgaagcgattgaaaacatgaacaatcgtgccggagaagccgtgattgctgctggtggcaatcgattggatgtcactgtgatcgccagtttgccacaattgataccagagtttgtttctaatactctctaccgttttgagttggctattcgttcagcatcgattcttggtatggtgggtgctggcggtgtcggaacacctttgattttcgctattcaaacccgttcttggtctagagtgggcatcattctgtatggcattatcattttagtaaccctcaccgactggctttctggttttctgcggaaacggttagtataaaattcgttgaaatcctaacatgtcggatcacttgcagatgaaggtccgctcttcttcgaccaaaagtgagaggtcgatttagttcagtggcagtcgttcagcaatcaaattgatttgatggaaaagaattttcaaggccgaggttcgcttaattctgtttttgatttcagagacaatgaaaaggtacatcaaggccattttcatgcatgaccacagattgatgctggaaaaatgccagaagcgctcagcattgaaaaatgtcccgttaaaaaaatagttgtgattgctgtatgatgccatggtcccatcaaaaaagactccctgagatatttcatctcaaggagtcttttttatccagcaagtcccgggctgcaactgatcaatcgctaccactgactaatgttgtcttcatatccaccttctcggtcacaacaccttcttgataaaaggtattcgcgatttgattttcttcatcgacaatgctgctatctgctttaacgagcgccatggcataagttcggcgttcaaccattttttgaatcacagcgtctgatagtttcaaggttttactgagcatggcaatgagttgtgtgtggtgattattggcccacgtcatatcatcgttgatataggttgtcagcaatttgcttagcgcggtgtgagttttggcataattttgggttgagatcaggaagtcacgattctttgccaagccggtgccgtttgtcagcaacttggccccttgattgacttgtgctgttgccgtatacggatcccaagtgacccaagcatccacactgccttttgcaaaagcgaccgatgctgaactttgatccatattcactaatttaacatcattggtggacaaacctgccttttttaaggcctgaataatcaagtattgggcggcagtgcctttttgataggcgatcgtcttgcctttcaattgcttgagattggtgatctggctgttcttaccaacaagaataccgctgccatattccttggtggcaccagcagcaatcagcgcaatatccgtgccagcagcttttgctgtcactggcggcgtatcgccaacgcgagcgtagtcgatcgccccacttttcaaagcagtcatgagcgcagcaccatcagaaaactccttgaagacgacttgatagccttttgctttcatttttttgattaactcaccgtgctggcgggcaatgtcgacaggatcggccttttggtagccgatcgtgactgtttccagatcactggccgccgtcgtggtctgcgtatagccatagacggcaacactaagccacatgattaagccgatcaccaagaaccaaaggtgttttttatgcttcataggcttgtccgccttgcattagctgtttgcgcagtttcggtcggagtactttcccagttgcattgaccggaaaggctttgacaaaaacgacatcggttggacattcatacgctgccaaatgctggcgagcgtaatcgatcaaggcggctttggctttcattgggtcgccggtcacgttttggcgaatgacaaccgccgtgactgcttcgccataaagtgcatccggcaaaccaatcaccgctacttgagcaacccagtctaactcattaaggatattttcgacttttgccggggcaaccttttcaccaccgcgattgatcatttccttacgacggcctttgacaaacagatagccatcttcgtctaaatagccaagatcgccagtgaggaaccaatcgtctttgaaagattcaggatgcggttcgaggtaatcgtgaatgacgtgatcgccgcgaagagcaatttcaccttcaacatacggttgctggctcaaagaaccgtccgccagcatcagtcgcagttctgtacccaccggcttgccggcagatccaatttttggtgcattaattggatttaaggtactctgactcgccgtctcagtcatgccataaccttcgagaacctgcgtatgaaaatacgtctgaaaggctatcaacttatcttctggcaatgcaaacgaggaactgcggacgaatcgcaaatgaatgtcagggtgataagctttcaaggcgttttcgttcatgagcaaaatcgatatgattgtcggcacaactgaaacccacgtgacatggttgtctgcgatgagcggccagaatttgctagcggagaacttcggtgcgatgacaagtttgccacctgaaagtcgggtagccaaaaccgaaatcacctgcgcattgatgtgaaacatcggcatcacgaccatggcgatatcatcagctgataaggaatgacttttggcatcgtgttgggccgcattcaacaacatgcgatgggttaagcccacgcgtttcggcttgccagttgtgcccgaagtgttgaggatcaaagccagatcctcttcttttggccgtttttgcggcgcgtttatgcgatacgcaagctgactggcatcagttaaaatcgctagcgctgcgatagtatgcagacgaagccgactgcacggcatcaatggttctgccagcttttcgccaacatcaggcaaggttataactgcctgatagtgatacaatgaccattccgccttcagttctggcaacggggtcgcggcagcaatcggatggacaaccgcaccaatctcccaaagtgcctgatttaacgccagatggacgggagcgtttggcaaagcgacaagaatctgatcccccgcaccgattttcagtttattcaactggtcacgcaaggctgcgacatcctcttcaagatcgcgcccggtataccaagtatcggcagcgactgatttcacaattgggtaatcacgctcatttattagattctgagacaacagatcggtgagtttgctcatgattcaagactcctttcgatgaaactgacaaggactgcggacggccaatcagccacccaaacggcgcgatccggtagcatagccaagcaatggtaaatgaaacagctagaataaagatatagccgattggtagtagtaagatcaacatgccattgctaaaaccaccgagactcaacaagccgcctaacaggctaatagcaatggtttgacaaagataaacgccgaaagaaacttgcgcaccatgaccgatcagtcgtgccaacaaatgttcgggtcgcttcgtatgccaggccgcgtatcgctggcctaatacgaacacaaaagcgatcatcacgacatcgtagatcaacatataaggctggtgcggcgaaacagcagcgttgtgaccaaagttcagaacttgtttgttaaaaacatagagaccaatggtaccgatactgaggctcaaagcaccccagctgattgacacctgatgggcaagaagccattgcttgaccttttcatagtgcatgctgacgagtccaccgctaatgaagaagaactgataggtgaaaacattgaccccataggccttaaaccaccataaccagtcgcttgtgttgacatgtggcaacccatacttaatgctgatgactagcagcatttggacgccgaagctagcgacgactaacctgatatgatgaccagccgtccgtttaaatagccacagcatggctggaaacaatagatacaattgtaaggtgaccaaaacgtagtagaggtaaaattgatcgccatgcagcaaggcactgagatagtctggccagaagttggcgatggtaaagccgccaacaccaagcagtactgaacctgccaacaataaagtgttccacaagacgtaaggtacgccgactgttgtgaagcgttttttgtaaaacagcggccaattgcgctgacgccggtaatacaccatcgtcaataccaaaccggtcataaacatgaaacccattcgcgtaaaatgaatcattaaatgtgtggctaagaatccagtactgattaaaccgctggatgtttgatgctgaaatgccgttgtcgtgtgattcaacagcacacctgcaataaaaatcaaacgcataagatcaatttcatatagataaggatgcttaacttttttcggctcgcgccgctcgccgtcattcgcctgcttcatgttgtcaccggctctgacacaatcgcgttcaaaactcgtgctgctgtgttcgcaattttctctggtgattgaccacgagcaccgcttgtttcgtatgccagcttgccatctttgacaaccacaatgcgatcggccatgcgtgcagcttcattaacatcatgcgtgatgagcaaactgcttaaatgctgttttgtgaaaatatcaaggatcagatcttgcatatgttgccgcgtcaaggcatctaatgcgccaagcggttcatcgagcaacagtaactgcggcttagctaacaacgctcgcgccaacgccagccgctgcttttgaccacctgaaagttgtacgggataaccatcgcttttgtcagcaaggccaactgctgttaacagtgatttagcttgttgcacgatagcgggatcgtgtgatcgaaaagaaacgttgtccaaattggttaaccacggcagcaagcgatcattttgaaacatcatccgcatgaccagtccattttgacgttggatgtcaccggcagtcggcggctcgagtcctgcgattaggcgaagaatggtgcttttgccgccgccactcatgccgaccagtgccaagaattcacctgggtacaaattaagatgaatgtcatgcaagacagttttatcgttataggtttttttaatctggcgtaaactaataattggatcagtcatgcctcgacacctccttgacgccaactaaggaagactttttctaaacttttcgcaatgaggtcggacaccttgccgagcaatgcgtagatcaaaatacaaagcaggacagtgtccatccgcataaattcttgtgcattcgttgccatgtagcctaagccggaactcgaagaaatggtttctgcgacaatcaatgtggtccacatcacgccgagcgcgtaccgcacacccatcaaaatgttgggtaaagccccaggaaaaataattcgcgtgaacaagtcgcgctttgaaagaccataggcatgccccatttcaagcaattctggattggccgttgttataccttgataagtattgatgtagatcgggaacatgaccccgattgccaccaacgatattttggccgattcgccaatgccgatcagaataatcagcaagggaatcaaggatagatgcggaatgttgcgaagcatttgaatcggactatctaataaggctcggattggtctgaccaagccgttcatcaggccaagtacaaatccgatactgccaccgatcgcaaacccagctgttgcacgatacaggctaatcgcaatattttttggcaattcgccactttgccacaaggtgatgccatcttgaatcaccgttaagggtgccggaagtaaggaactcgtgagccagttaaaactgaccgcagcttgccatccagccagtaatcccaacggcacgatccaaggcagtaccttgaaccaattgatatgtcttttggtccgcggctttggccgttgcgtgagtgtcgtgacttcttgcatcagggccatctcctttaagttgatggtgttcatactaacgagagcaacttaaagctgacttaactccatttgaagagtttatgacctaatcagcataaaaaaatgccctttcagcacgaatcatcagctgaaaggaccggaagtttgtctaaaatggttcttgaccaaaaggaattcataatcaataacatggcgagcacatttgagttttaaatcatttagcttaattctgtcacttcaaaatttaaaaaagggcatcaggtgttggatgtcgcaaatgattttcgccttattttacgtgcctgaactttgatatttcaccagaaaaagccgccatagttgataaacgagggtgaagaaagcaaccgagatgccaacaaccaaaatagcaaaataccagcggccatcgttaatgaccgttgattgcggaatagcggccacccaacctaatggcaaaaaccaagtgaggatcatttttaacggtgtattgtaaatggagagcggatattttgaaaattcaaaaaagtcataaactgtctccgataaatctgctaacccttgtgacaacaacgacaccatcccgcctagtaaggttaaggataagaagattaaagaggtggcacagcacatcagcaggaccagcaagaaaataagtaaaggcatgtgcgagctgaatgcaatcgtggtcaaaatcagtacggatatcgccaagtcaccccaagcatcttcatcaaaactttcattcaacaactgaaaaagcggattgacaggtttaaccaacaagccgtcaaactttccttttcgcacataatccgcaatattcagcgtattaatgaaaaaacagcgaaaaatcgcaaatgaggtgctggcaatggcatacgtcgtcaacagttccgtaaacgtatagccctgaatcgtcgggactaacaaatataaaaagcgaagtgccgcaacattgattaaattttgaatcatcatgccaacaattgaaaaataaaaatcaaaatcgtaaatagctaatgatttgaaattaattttgaaataggttaacagtaagcgcgcatatctcgtcatcagctaacctccctgaatcacaacacgttggatcgctattttcagctgcaagtgatagacaccaaataacgtggcaatatagaggctctgcatgaacaatgtcggccaaaagtcggcagcctgctgctgtgataacaactcaccaatcgcaccgaacgcgtattgaaatggcaaaactgtgcgattgttttcaccgctgctgggtaaaaattcactggaaaaacatttcccgacacggccagcaaaacagcagctttaaacgtattgataccccaaatgctataggtgtaaaaagaaaataaccctatgatcgcctcgagttcaaaatacagtacatatccaagcatgaccgccatcaccaacaacggtaacgtctgccacgcaagcgctgactgcctcaccgcgaccaataggatgacatcagggataccgataaaaatcaacttgccaaatgaataaccaacactttcccaaaaataatgggtcagtaacggcactggccgcaataacaggcgggcgatattacctgtacggatatcgtcgtggatagcaaagctagttttcggaaagacggccgtcaatagttgcatgaaaatcaaataagtgatcgtttcggcaaaaacagcacttggccgatgccgtaaaacactttgccacagaaaaaacatcacggcaatcgaaattaaattgccaaacaagtagaagccaaacgcatagcgattggcgacactccttttcaaaccaattcgaatcatcatcagtcttaacgtcattggccgccacctgttgtcagtcctgatgaaatgacatattctaagcgtttattcgcaatcgtcacagaagccagctcggttgtcgcgatgagtcgcctcataaaatcttgaacctctttagaagatagtcccgcgactctaaaatttccattgggtagtgtctgcaccccaacgtcagcaagagccgctggcagattagctgaatcaacgagtgaaaattcgatctgtgatggcgtcgcgatttttgccaaagcttgtgctgaaatgtctgtcaacagttttccgtgatcaagaattaaaatgcgtgagcaaattttttcaacatcctcaagatcgtgcgaggtgtacaacaaggtcttgccttcgacttgttgtaggaacttaacgattttattcttagtgaccacatcaaggccaatagttggttcatccaaaatgatcagctccggatcatgaagcagcgatgccatcacctccgctttcatccgctgacctaagcttaacgttctaaccggttgctgcaaaaagtcttttgcgtccagtaatgatgttaaatgctcaacccgcgctaaaaaatcttcttttgaaatacgataaatctctttatttaataaaaacgtatcataaaccgggagatcccacctaagctgactgcgctacccgaacacgatgccaatgcgttgcgcatttcgctgccgatattttgtcggatctcccgaaaatgtagcaagtgtcccatcatctgcccgcaaaatccccaacatcatcttgatgagtgttgactttcccgaaccatttaagccgacaatgccaactttttcacctgcctcaatggcaaagctaatatcatcaactgccgtaaaaagtgtgcgtttcttttttacaacgccaatttttgctactttaacgtattgtttcgtaacatggtctacctcgataagcgccatgaagctccttctttcgttcaaatccatgtgtcctcaatgttagtgtcaataaagacatttgtccgtttttgctcagcttcatcgtgcttcctccttaggttttaaaagaataactcctgacatgtgtactttagtagattacagaacgttgtttacgccgtcaaacaaaatcactcgattaaaggtaaacattgtcggtttattatgcctagaatgtttttaacataaattaatcatattattcatatcaagacttttctgttgtataatcctaattctaatttttcaatgaaaaatactaaccgacttaaatgtcactcccatatttccgagtaaaaaattctaactactggaaaagtgttcactagaaccttcaccgccttattagaggtgattttgttagaaaccgatagcagcaagccatttctaactgacaaccaaacccaaacttggatagattggaccctcaagtatctgcaggtcgaaaccgattggcgcggttatgttccggtaaaaaggctgggcgcatggcattcattgcccacggcagtgatgcagccgctcatcctaagataaccacagcgcagcttcagcaggcgttggatgtcgtcgctaatgtcttagctcgacaaaaaaagcccttcctagacgatgaggaagagcggttagccatgatcgttttacgtgttagtcaaaatctaaaccaggcaactggcagcatcagacgcttttttaacgagaccgacattattcgctggactgattatacagagcattcgcataacaacgaagcttattatcgcgtctcgtcgtggatgcgcctgatgatgacgttgtattttatggcaccgtccatgcagccaacactgctgccgttggtgacaaagtattttcagaagatgggttatctcgattaggttatgggtttgtcccgtccgcgccggaacttgcctgcccgtctataccagtattacccgttgcactagatgattgattgccatcgtcagctccggttgacgccccttgatctgtcgctccagtgccagcaccactattgtcggcattcggcgtagttgttgttcctgcgccgctattgtctgtcactgaccccgagctaccgctgccagtattcggcgcataccaactattccaagggttgttatacccatatccgccagtgcttgtacctgtgcctgtctgcccgttaccaacgttacctgactggccggtttcagcagattgcccactagctgattggtcagtctgatcctgttggccttgcacctcagaagctgtattgctactctcagctggttgactagcctgaccttcatcctgcgtcatctgccgtaagcgttcagcatagcgttcactcagatgctgaatctcagtacttaaagtcttaaaattcttatcagtgtagacaatatctctctgtgtattaagcacatcggttaaagcatttaacccagcgagcttcgcctgaaggtctttcttcttgatgtctttcaattggtcatcagtcagcttatttttcttcaggctcttttgattcttgtcagtaaaataggccttttccttgttgatgagttccttataaagcgctatgaccggctgttttctatctgcacgcagcgaatacgcctcactacgcgtctcaagattcgccagtgcctgcaatcgtttggcatcatccttcagcgccacattctttttatgttgtgctcttatagcggttaatgtttgatcaaccttagcattgcgcgcttgaatcgcttgttcagcttgcgttttgttatgccttgcgaccccaaaaatgagtgccgcaatcacgacgaccacggccaaactaattaagaccagttttctccttttcatcactcaatcaaaatatgtagatcacacacggcgatctatctatttttcctccaaatttttatagtttaacgattccccaaatacggtggcgcaaaaaggctacaggcttatgcaccattctcctattaattctaccatgtgaagttttaaaatgttataggcgtccataaatcttgctttcagaaatcagcatgcttcagtgcttgccatagttgctgccctcgtgatacatttttgatgagtactagcatgagctttttcatttaacaaacagcacagtcattcttccttccacaaatggaacctcaaaatcgcacaactatttaaacaaataaatccgacaatccgaatgtgaggatactgatgaaagcgacttataaagatcaatccgccgaagtttgggaaattagtaaaaacaacgaattccctgactgggtcaaagaagcttttgaaaagaactaccttgtttggttggatgaccgacttcgtattttaatggccggtttgtttccgccaatgatcgaaagcttacaacgtgacaaagccagcatttttcacgctcaaggcgttcagtttggggtcgtgacaattggctatctaggtgactatttggacgtcacaaatcaccgcgtcgtctctaagcagcagtttgctaggcagtatcgaattgaaaaaacaggcaaccaattttaatcccacattaagtagtggctgttgaactaggccaccatatcttcgacccttgtagtaaatttgtagcgaatttgataggcctcaccctcgaatttagccaaaattaaaattggtatagcaaatacccttaacagggtcagcacattgctcaagacgatggccgcgtcaatcttgacggccagtgattcagctgtccgagtgttcaccaagccaagccccagcgtgcccttcataaaagcaaaccggcgttcaatggtacctcttcgattctcggcatcagtatcctcacgccgtttcgctgcatcaacgtgttttggatgccggccaagcttcggaccgcagattcggatacccaaatccttacacagctttaggttctcccgattacggtacagcgtatcggccagtacttcatccggataatgtccatgaaggtcgtaatagtggtctaaagtttccgcgaagtcttggccctcagagaatgcggtgaaatcaaaacgttcaatgtcgactacgccttcacttaacgaacagtcaatcttcgccccaaattcaactttagcattggccttaccacgttgaattgggcgaatgtacggctgttggagactaacaattcggtcttcaacgtggtgagtcttgtgggtatacatgtaccattgctggtcaaatagaattcgaatcacgcctaagcgaatcgcttgttcatctggtagagtcgcaccctgatcgatgaattcgttgatgtaccgcaaatcacggcgcacatattgaagttgggccttgacctgtttatgaaagccaccacgctgttgctttggatgtcgtgaaaatgaggtccaacaatgcttcgcctcgcgtttgtacatgcgtgggtttggcacaccaagttggtgtgccatatcgatcgccatcgcctcaagattcagccttgcttggttgaggaggacggtgtcttgaggatacttgattttgactggcactgcggttgcgtccgtgatgacggtgtccactttgaatgggaccaacgcttcgatcttggcgcgtactgtatcattcatgatattcgtaatcagctcggagatatcggcaattcgtttgcgaaagtgtgccaggctggaataattgaacggctcaaccgctttgtattcggacaacccgatgaaatattgaagtgcgggtgtatcacgaattgccgcaaccaccccacgatcagttaaacccatccgttgttggatcaggattgccccatagagtaaacgaaatggttttgccgcacgtcccgcatttttggtgaactccaattggtatgcctcatcgagagctttccagggcatgacctccgccaactggatccactcattgttagagctaagtggggtacttaaaccggcaccaaaggattcaaatgacaattgaagcgggctgtgacgatagaccatacgataacctccgagtaggttcccaaaaaatgcaaggaaaatgcaggaaaacagctaattccaatggatttattataccgcaataatgcatatattagcttaactgcctgaattatagaatttttaagcagccactaagtaaaaacgcatgtgaacagactagttcagactagatgatcacatgcgtttttttacttcaaaatcagctgactattttcagtgcaacaaaaaaacaccttcccgaaaatcaggaaagtgctgagacgccaaatgttgatcgaatgattaacgcttggagaattgtgaagctttacgagccttcttcagaccgtacttcttccgttccttcatacgagggtcacgggtgagcatgccggcctttttcagcgggccgcggaagtctgggtcaacggtcaacagggcacgggcaatgccgtgacgagtggcgccggcctgaccagaaaaaccgccgccattgacgttaacgagcacgtcatagctgccagttgtttcggtgataccgaacggctgggataaatcagtgatcaggttttcatatggaaggtagtcgcgaacgtctttaccgttcatcgtgatcttgccggtgccgggaaccaaacggacccgcgcaacggagttcttgcgacgacctgtacctgcgtattgtacttgtgccacagtaattgcctccttagattaagtttgaaatgtcaagtacttctggcttctgtgccaaatgcgggtgttcctccccagcatagacatgaagcttcaagaattgctgatggccaagtgtattcttggtcgggagcatcttcttaacagagtattcaacgagacgagctgggttatcccgcaagagatccccagcgatttcatgtttcaaaccacctggatgctggctgtggtgatagtaaatcttgtctgaggcttttttgccagtcaacttcagtttggaagcattgataatgatgacattgtcaccagtatcaacgtttggggtgaattgcggcttattcttgccacgcaagatcgaagcaacgacagatgagagacggcccagcggaatatccgttgcgtcgaccacataccacttacgttcgatttcacctggcttagccaaaaatgttgtacgcacgatttgtttcctccataattctgtgcttgtttgaacacgttaagtttccggggcttatcgtggggcaaacaataccagctactagaataccaacgattggcgtctaagtcaatgtaaaaatcgaaaaacgatcgccgcgaaactgtcgactgctcagcaaaccagtagtgccgaaccgccttatctagagcagctttctcatgctatgtttttgaaaggacgcaccatcatccagcacacttatcagtcttgctggatagttcctttctgttggacccctgtacaaaacatttgcaacgcgcgatcaagcgataattggcgtttgaatgttatccggttgctagtcggacgctcatttggttggagataaactgataggactgtcaaaaaatacaacgtcacttcccgaatttggtaatccggcgcgagtcgttgtttaaaaacggtaaagaaactgtctaagggattcaacaggcctttttgccacgcttgaaacactttgaatcgcgctgcttcatttaagttgccaatatcatggagcaccaactgcaagttcatatcattgtcgtcggttaacaaatggcccagccgattgacgttggcgacaaaatgttgactatctgtttgttcatgcacgatttttgcggccattgcttcacttacatgcatgacaacagcaaggtacaaggcctctttagtcttgaaatagtggtaaagcaacggttgctggacactagcagcgtcggcaatcatccgcgttgtgaccgcagcataaccgtgcgtcatgaataaagtttgtgctgtcgtcaaaatgcgttgcatggttgcttttttctgttgttcacgttgattcatttttttaagctcttttcgtttatcatttgataaatgagtgatattataattgtgcaaaatcaaatgtagaggtgatcaagatgtttcttgcctataaagagattacgcacaacaaggcccgttaccttttagtggtggtgacttttgtgctaatttcctacctagttttctttctgactggcctggcaaccggtttagcgcggaacaaccgaaccgcgattgatgccttaccaggtaactatgtgctcatgtcaaaatacgcaaataaaaatctgttaagctcgactgtcactaagcaacaagtcgaccaggcagacactcatcaggcagcgctgcttggtcaagtgtccgttgtcgccgaaaacaccaagacgaatcaaaaggtgaacagtaatatttttggtgtcaatcttagtggcaagttgaagccacctgtcaccagcggccgaatgcccgaggacagcaatgaggtactggctgacgacagtgttcttcattacggcctccatcaaggtgaccatatcacgctcaatggcagcgatcaaaagtatcacattgtcgggctcacccatgatcgccttttttacactgtacctgtattctacacaactttaacgacttttcggcaattaaaatacggccaaagtcgtgtccagaacgtttcggttttgattagcccgcacgccttcaaaaaggtgcccgccaaaatggagcaagtcacccgagcgacattgattaacaacatccccggttataccgccgaaacttcgacgtttgctttaatgattggtgccatgattggcattatgttgctcattatcggtattttcatgtacatcttaacaatccaaaaaatctcgatgtatggcgtcatgcgggcgcaaggtatccgaacgcgtgccatcatcgccgcattattctggcaaatcctaatgctcgccgtggtgggcgttgcggtgggggcaggcctgttgatgctgactgagctgatacttcccaaaacaatgccattttatgccaatagtatcctctttttcagcattgcgacggcgttaatcgtcatgtcgcttattggtggactattttcacttcgacgcattttacgaattgatccattagcagcgattggaggcgaatgagatggcaattcttattcagttgaaacaagttagtaaaacttacggtactggccataccgcggtcacagctctgtgcccgaccgatttcactttaaaggccggtgaatttgcggccatcattggcccttcaggttcaggcaaaacaactttgctgacgattatcggcaacctgcaacgcccaagcaacggtcagattatcgtcaatcatcaagacaccacccatttgaatgaaggccaacgaaccgatttacgcttcaatacgtttggttttattttacaagctagcaatttgattccatttttaaccgtgaaagatcagctcgctttagttgatcggttcaatcatcatcacaaacatgaaactaccatgtcagcactttttgacatgcttggcattagcgatttggtcactaattaccctgctgctttatctggcggcgaacggcaacgcgttgccatcgcgcgagcattgtacaacgatccgtcgatcatcctcgccgacgagccaactgccagtctcgacactaagcgcgccttgcaggtcgttcagttgttagcagatatcgcacaccattctcaacgcggcgtcatgatgattacccatgatacacgcttacttgacgctgtcgacaccgtttatgaaatgcgcgacggccatttaaagacgttaactgacgaagggatgcggaaaataaaggcaagtgccatctaaaaggtgatgtcgtaaacgcgctgactgttaccagctatcggctagcaacgaagaaacaccccaaaaattagcactcaattaaaaacagtgctaaaaatttgcaccatctcctagtaaaaggattataatgaacttgtatcaaaaatgagtataaatcatggaggtaatcattatggcatcagtagatcctgaaaagacattgtttctcgatgaaccaatgaacaaggtatttgactggagcgacagcgaagcacctgtacgtgatgcgctgtgggattattacatggaaaagaacagccgcgacaccattaagactgaagaagaaatgaagccagtcttagatatgtccgacgacgaagtcaaagctttggccgaaaaggtcctcaagaagtaaccatcgtcaaacaactgaatatcatgaaccgcggatcgcactatcgggtcgcggttctttttttgcaaattttaggaagtcctccccgccaaataattaatttcttttgcgcttgaccctgaccttacgtcacggtttattgttatagttgattaagggagcgcgcgaaccaagtcggtttgaaaccggcatataagcgacttcaaggacatcggccgggtctttggccatctttggccattgcccttggaagtgtctggttgagcgcgtttaggaggcaagtgatgacctattctacaaagcaactagccgatttgactggtgtgacaccacgaacattgcgctactatgacaagattggcttgctgaaaacgcaacgtgatcctgataatcagtatcgcgtttatactcaggctgaggttgatcgtctgcaaaccatccgcttcttacaattatttgagatgccgcttgcccaagtgaaggtgctgctagacggtcctgctgaaaacttaaccgccgctctcaagcaacaacgcaaacgcatcactgcgaaacgcgatcaactaagcttactgctcactacccttgatcaaactttagaaaaaggagtcgatacaatgactgatgacgaaaaatttgccgcttttaaagatcaatccatcaaagcaaacgaacaacaatatggtgaagaaatccggcaacaatatggagatgatattgtcgaagccagcaacaaaaagttccgcgatatgtcacaggcgcaggtcgcccaactaaccgccctacaacaggaaattttagatgccttaaagccgttagttggcaccaccgatttcaataccccggaggcaaaacgcgtcttcaaattgcacaagcaatttctacaaatgacctggccttctgaacaatattcacaaaaagctcatcgcggtttagctgctatgtatgtttccgatccacgttttagcaagtattacgaagacggcaccggcaaagccggagcggctgaaacgttaaatgcgattgtgcggcactatacgcggtaatcacaatgatgttctgccttacctgattgattcgtcaaaaagcaccaaagcgtttgtgttacatgctttgatgcttttttctttggcttagatttaggatgattctttattacgtacgatataaatattccatacgactaatatcacaatggtcatgaccaccgccactgcgaagataacacgtcccatttttgtgtagacgacaacccctgcatacgccaatcgctgaagtatcacgccaattcccataaccaccgttaccaaagcgattaagcgaaactctgacggcattttaacccaaaaatacaatgcaccaagaattgtgataagaacaattagccccacatcccatggatataaaattttgataccaaattgacttggtatttcctctagccaaatccaagcagcggcgccacctgcaaacaccaacgccattaaaacaccagccgagaatcgcttccaagatcgatgagttgtcgacacggtgtagaaattgactatccacaaaattagtgctaaacagattccctcaataaaggcaactcccaaatacttccaggggttcagaatcatggcttgatcatcgcgcccattaccgccactcaagaagagatatagccaagaaatgccgacaacaatcccgattagttcaaggcgctcccgcaaactaatcttcggcatttgcgtgagcatctcatcggccattttcttgggctttttcccaaaaaaatttgacgctgagatgccatcttttgaagcatccaccagatcctgtgccattgtataaagtgatttttgaattgccagctcatcgcgtgaaaaggcctttttagtgactaaatataattgtaaatcttcaaagtattgttgatcattttttgacaagcctagattgcaataataaagttaccacctagaaagaggcttgctcactgcttgaactggggtttgccaacggagacattttctaggtttgttattgataagcgctgtggcttgttgaatatcggtctctgaaacctgatcaaactgtgttcccttcgggaaatagtagcgaagttctcgattgaaccgttcatttgtgccccgttcattcgggtgataggcgtggcaaaagtaaaccggtatccgatagcgctttgtaagcgcctgatcgcaggaaaactctttaccgtgatcaaccgtcactgatcgaaccggacccggaaagtccaccatcagtcttgcaaaacccttgagaacagcattttgtgataagttttcaagcttagttgtcgccattaaacgtgtgacccgatcgacaatggtcaaaacagcagcctttgacccgcgaccaccgcgaactgtatccatctctaaatgtcctttttcggttcgccgattagctgactcactgcgaatctcaattgaggtgcctactgcttggttatagcgcgaccgaaggtcttgtcttcttttatgacgtttaccgtgatcaaagagttggcttggctgaaaatcgacttgtctttgataaatccagtggtaaatcgtgtgtggcgcacagtgaacggcataaccgaccatttcaggggaccaacctaggtttagcttctcagttaccatccgcttcaacttaggcgttaaaatcgagtgccgaccacaacgatgccgacaagtatcggcatgatcctgagctataatggcgcagtaatcaccttcagggcaacggtgaagctcatgcctaatagaaatacgagagcggcctaaggtcgcggcgatgtattgaatcgtgtggtgttgcatcagttctatctgagatcgttcaattaaggttataatggccatgggacctgtccttctctctagatggtatgttatgcaaacaccattttagcaagaacggacaggtcttttttcacattttctgggtggtaactttaattatgcaatctaggcaaggactgtattaattgatttgtttgatcacgataccactgcgaactgtgttcactcatcagcgtcatcccctttatgtaaaactgtagccacctgcacaaccaactgctgccattgtcgctcaaaggcagcaaggcttgttctaccttgctcagtgacatgatagtattttcggtctgggccctcaggcgaaggacgcatgcgactggctagatcaccatttttttcaagctttgctagcaaaggatagattgtaccacccataaccgaattgaatccagcctgctgtaacgcttgaatcaactcgtagccatatatctctcctttagccacagtggcaagaacacatccttccaggacacctttcaataactgactttgcttcaatttgcacctcgcataactaggttgttttactaactagatagtagcatgtgttcactatgttgtaaagctatctagcaaaagcaaaaaagccaacgccgcagcgtcagcctctaataataaacttccttcaagtacagccctgatgctggtgcggtgccgcgtgcttgttgacgatctttgactgcaaacaaacgctgaaagtcgtgaacatcacgccgcccattaccaatttcaagcgctgtcgcaacgagaatccgaaccatgttgtaaagaaaaccattgccatagaattcaaaaataatttcgtttgtcactgaatcttctcgaacagttgcctcataaatcgtccgaactttatcgacaatcacgccgccactggccgcaaagcttgtaaagtcatgtgtgccgactaggtccttcaatgccacttcaattcgttgcacatcaagtttgtaaggataatgaccagtatataggcggttaaacggatttgtatagtaaccatgagccactcggtacaaataccgtttgcctttagcggaatagcgggcatgaaaatcggcatcaacgatttcagctttaagaatttcgatgtctaatggcatcaacgaattcatcgctttcagcatcgactcagccggaatatttcccgggtaatcaaaactgatcacctgacctaaagcgtgaacaccagaatccgttcggcctgaaccatcgacatgcactggctgccccttcgtcattttggttaaagctttttgcagcacaccttggactgtgcgctgttttggttgaacctgatagccagcaaagttggtgccatcataggccagtgttaccttgtaatgcgtcatgatgtcccttctattaagcacgcaacaacagcaatagaccggttaaaacaagcatcccgcctgctgcaacccagtcgcgccgatgatagcgtaggatacggtacttcgttcggtcatcgccgccttggtagccacgcgcttccatagcagtagccaattcatcggcagtcgtaaagcttgagacaaatagtggaattagcaacggtacaacagccttcatctgctggaaaatgttaccttcaccgaaatcaacaccacgggcacgctgcgcattcatgattttggtcgtttgatccatcagcgtgggtacgaaacgcaaggcaatctgcaaaaccaaagccagctcggttactggtacgcgaatgacccgcagtggcttcaacagactttccaccgcatcagctagcgacagcggctgagtactcaaggtgagcaaagtggacatgaaaatgatcaacacaaaccggacaaagataaaggctccgtttatcagaccaaattcagtaatccataaccagccccaatgccagtaaaccgtaccaccacgaacgaatagcacctgcagcacaaccgtaaacagaatcagccaaatcagtgggcgaacccccttaaggaagaagccgattttgatacccgataaccaaatcattaacagtgtcgctacaaacatcattaggtatgtctgccaattattggctaaaaagacaattccaatatagtagaagctggcgataagtttggttcgcggatctaatcgatgaacccacgagtcgccgggaatatagcggcctagcagtaatttatccacgctggccacctccaatttgcggcaccaattgatctgccaactcgctttcagttagcggttgtggatcaaagtggaaccccttagctgctaattgttgcgccagttgcgccgtctttggcagccctagctgattcgcttttaaccaagctgggtcagcaaagatctctcgcggtgttccggttttgattaacttgccttctgccatgacccaaactgtatccgcatagtctgccacatcatccatttgatgtgtcaccaacacgatcgtttgtccttgctcgcggtgcaactgttcaaacatttgcatcatctcatggcgtcctgaagggtccaggcccgccgttggctcgtccagtactaacacctccggctgcatcgccaacacgcctgcaatcgcaacacgacgcatctgaccaccagatagatcaaacggcgacttttccaacacatcatgcggtaagccaaccattttgaccattttatcggccaaggctaaggcatctttttcgctaaccccaaaattttgggggccaaaagcgatatccttagcgactgtttgttcaaacaactgattttccgcaaattggaaaaccatcccgactttttgccgtagcggcttgaggttcttattgttagtttcattggtaatgaccttgtcgccaatcgtcaccgtgccggaagttggtttcaacaacgcgttcagatgttgaagaatggttgatttgccagaaccggtgtgaccgataattgccgtatagctgccgtctcgaataaccccgctcacatctttaatgccatcaccagcgaaaggcgtacctgcctgataggtaaagctcacatggtcgaatgtaatgtccacaggtagtctaccaacctttcattgtccatatagtctttcggcatcgcaatgccgcgctgggccaaagcatctttcagcttctccgagtatgggacgtccaatcccagtcgtaataattccatcccatgcgaaaagatctcgcttggggtgccaatctcattaattttgccatcattcaagagaataatccggtgcgcttccgccgcttcgtcaatatcatgtgtaattgaaagaaccgtcaacccaagttcgtctttcaattcccgaataacacccaacacttcttgccgaccagctgggtccagcattgatgtggattcatctaaaataataatttccggacgctgagccacgatgccagcgatggcaacccgctgtttttgaccgccagacaaccgtgccggttcccgatcggcaaaagccgtcatgccaacacgatccaaggcctcgtcaactcgcttaatcatttctggtcgcgggacgccacgattctctaagccaaaagcgacatcatctgcgactgtcgcaccgacaaactgattatcaggattctgaaaaacaatgccgactttggcgcgaatatcccaaacggtttcttcactcaacgtcatgcctgctacctgcacagtaccggattccggtgccagcaaaccatttagatttttggcaagggtactcttcccactgccgttgtgcccaatgatcgccagccactcacccttggccacatcaaatgaaacatccgtcagtgcttgctgtttggcttcaggataagtgtaattcaaatgttgaacacgaatgacgttgcccacgatgccccttcttcctacgctttgtataccggataatgataccatattttgcttagccgatgggagttaggctcccctcgtcttgcagttactcggcaatgtcagcatgtgtgaaaatcgtacacacatgaaaaccaagtttgttagaaactttttttaacgatgtcgagcttggtacttagaagtgcaaaaaaagtgcttaatatcaaaccacctattaataacatccaagcttgtacacgcatcggagtcgcattcaacatcaccatgccaaattgactgttaccattcacgatcaattgattagtgtgcattgtcatcagcaaaagcacaaggaaaatgactgttaaataccgagaaccgttcacaaacagtcctgcatatgcggcgcagatcccgactggcataatgacaacaaaactaagcattgccagcagcagaaagccgtcaagtgagtgtggtttcgtcaaccaagacagtggataccattgagcaagaagcaaaatgatgacccagaaagtcgttagtggtataagtgttttgggcaatgcaggggttagtttttgcttgcgatattgtcgtcccgtcagataaccacttaacatcgatatgagccaagcatatgacagccattgcacagtaacgctgccgttagcaaggtgatccactcccggcatcaataaaccacctgtgctgccatttggtggtgttaacaagaccaacaggagaacccaaacaatggcaatcagtgaccaaatgccgatgacatataatccaatctgccatggtgctctttgtttaagccaattgtgcatgttgttaacctccgttattttgcagtatacaggaaaaaccgccaattttggcggttttctgcgaggtttttcaggtttgctgtggttcatgctattgtaggaatgttctatccttgacaataccattgagcttctgcgcgttctataacgcgctcgccagcccagaaacctgcgtgtaaggactttggtcgcaatggccaaaacccagccatcacgaccaaagccacttacactccggtttctacccgggctggctcgcgcttccacaaaaaaatcatttaatgatggagacaaccggttgcccggtgctctcaagctagactaagcaggaactgggcctgccatcatcgtaacgctccatcgatcaaatgatcaaagttggttgaccgcgtgggccatccattttcaactgtgtttagacgagctcaatgataaccattggtgcaccgtcaccgcgacgtggcgcagtcttcaagatgcgggtgtaaccgcccttgcgatctgcgtattttggtgccaagtcactgaacagcttttgcaaagcggacttcacaacaacactgttgtcatcttgttcctcgacactcgcgatttcattgcgaacgtaagctgctgcttggcgacgggcgtgcaaatcgccgcgtttgcccaaagtaatcatcttttcagcagttgaacgaacttctttagcgcgggcttcagtcgtgacgatccgttcattgatcaaaagatcagtggtcaggtcgcgcaacaatgccttacgttgtgagctggtccgccctaatttacggtaactcatggattggcctccttttcgaaattagtcttctttacgcaatcctaagccgagatctgccaacttgtttttaacttcttcaagtgacttacgacctaaattacgtactttcatcatatcggcttctgttttgttggttaactcctgaactgtgttgatcccagcacgcttcaagcagttgtaagaacgaacggacaagtcaagctcttcgatagtcatctcaagcatcttttccttgtgagtctcttctttttcaaccatgatttcagcgttcttggcttcatccgtcaaattgacgaagatgtccaagtgttctgtcaggatcttcgctgctaagctgatggcttctcgtggtgagattgagccattagtccatacatccagcgttaacttgtcgaaatcattccgacggccaacacgggtgctttcaacttgatagttaacccggctgatcggggtgaaaatcgagtcgatcggcaaaacaccgattggcatgtcatcagacttgttttggtcagctgccacatacccgcgaccctttttaacggtcatacgtacatggaagtgcccgccatctgcaacagtacagatatactgttcaggatttaagacctcaacatcaggatcagcgacgatatcagcagcagttaccttagccggaccgttgacatcaatttcgatgttcttgtcttcatcagtgttcattttgagtgccaattttttgatattcaaaatgatctgggtcacatcttccagcacaccgtcaatcgtggagaactcatgtagtaccccgtcgatttggatgctgctgatagctgccccaggcaatgaagaaagaaggatccgccgcaacgagttacctaaagtagtaccgtagccgcgttccaacggttcaaccacaaacttgccatagttggtgctttcgtcaactttggtaatgttcggcttttcgaattcgatcatctagtttgtacccctttcaaaacgagaagtgaagatttgtctgcctgaccgttaaagcggccgaagggtaacaattaaacacgacgacgctttggaggacgagaaccgttatgcggaaccggtgtaacatcacggatcgcagtaacttcaagaccagttgcctgaagtgaacggatcgcagcttcacggccagagcctgggcccttaaccgcaacttcaaccgacttcatgccatgttccattgattcctttgcagcagcttcagcagccatctgcgcagcaaaaggcgtcgacttacgactgcctttaaagccgagtgcaccagcagaggaccaagcgatcgcattgccgcgagggtccgtgatcattactaaggtgttgttgaatgttgagtggatatgagccacgccagattcaacgttcttgcggacacggcgcttccgcgtagtttttctacctgccatcgatcaatgacctcctttaattattttttcttacctgccatgcttgctttcttccctttacgggtgcgagcattgtttttggtgttttgcccacgaactggcaagccacgacgatgacggatgccgcgatatgaaccgatttccatcaatcgcttgatgttcaggtttacttcacgacgaaggtcaccttcaaccttaacggagtctaaggctgcacgaatcttgtcttcttgttctggggtcaggtcatcttgacgaacgttttccggaacaccggcattcttgaggaccttttgagcggttgtcttgccaacaccataaatataggttaaggcaatgacgatttgcttaccacgtggtaagtcgacacctgcgatacgagccatgtacaatgacacctcctattgaattagtttgtattatccctgacgttgcttatgctttgggtttgcagagcagataatcatgacccggcctttacgacggaccactttgcagtgctcgcacatctttttaacagatggacgtactttcatgagaatttagcctccttgagttggcaactacttgaaacggtaagtgattcggcctttggtcagatcatatggggagagctccaccgttaccttatctcctggtaaaatccggatatagtgcatgcgaattttaccggaaacatgggcgaggatctctgcgccgttttcaagtttgactttgaacatcgcgttgggtaaggtatccgtcacggtgccttggatctcaattacatcgtcttttgccacgaagtgtttcctcctaaaaattattggttctattaacgcgcgaaaagggtgaggccgattggcactcaccgcataccgcgatattgtaccataattcttcgactttgaaaacagtcatgaggggcgtgcaatcgtccaagcacttactttgccacagcagccaaaatcgctttgatctcggcaaacaccttatcaatgtcctggtcgccattaaccgtgtgaagcaggcccttcttttcatagaagtccaacagcggtgtgttcatttcgatgtttaccttgagccgatttttaaccgttgccggtttgtcatcttcacgctggaagaattcatgaccgccgcaacgatcacaagtgccggcaacctttggcgggttgtagattttgtgataagtcgcgccgcatgtcttgcaaataaaacggccagacaaacgatcgactaattttgcaggtgcaacatcgatattgatgacagcatctaacggtttcttcagatcggctgtaatcgtttcgagtgcctctgcttgttggatggtgcgcgggaagccatcaagcatataaccagcatcggtatcagattcagcgagtcgttccttgacaatgccattcgtgaccgagtccggtacgagttgacccttatcaatgaaacctttcgcttctttacctaatgcggtaccagcagccatcgcagctcggaacatgtcaccggttgaaatatgtgcaatcggataagtgtcttcgatccgttctgcttgagtacctttccctgcaccgggaagtcccattaaaatgagattcacgttgcatcctcctctaaacgcgctcgccagactagaacctgacgtataaacgctcttaaacacaataaccgaacccggtcatcatactcagattcgcttacacattggactctaatcaagctgactcacgttctgtttaaatgacgtttattttttactgtcgcctttaatcaagtctccgcgaatgaaaccgatatactcgcgtttcatgagtaagccgtctaactgacgaaccaattcaatcgctgtcatgacgacaatcaagagacttgtgccgcccagtccgattgactgtggcaagccccaaatgttggcagctaactgtggcagcaatgcaaccaggccaaggaacaatgccccgacggttgataatcgcatcagtaaacgcgagatataattctcggtttcttttcctggccaaacgcctggaatgtaactgccttgtttggttaagttctcagagaccttttcgggattgacctgaacaaacgcatagaagaacgtgaaaagaatgattagaagcgtgtagatcgcagtcccggcaggtttttgcatattgaagatgttggtcatgacttgataccagccatcaccgctatgattcttttgaaaagccatcagaattgtttgcggagttacgatgaaggaactcgcaaagataactggaataacgccggccacgttgacctttaaaggcaagtagctgttgctgcctgcgctggtgacacgccgggtatattgaatcggaatcttgtaattcgcttgctgtacccatgtgacaaacgtgatcactaggatcacgataatggctaaggctgccatgaaggcaatccctttccagatttcggcaccagagtatacctgaacgttatcgcggtatagctcttgaaggccagaaggcaagcgagcaatgatcccggaaaagatcagcaaggaaaccccattaccaagacctttatcagtgatctgttcacccatccaagtcagcaacatggtgccgccggttaagatgatcccgatcgtgatataggtgctaacagacggatttttgaccaagcccatcgaacttaacgtttgaaagccggccgtaatcccgattgcctgaaagaacccgaagataatggttaagtaacgagtcacctgattcagcttacgccgaccaacttccccttgcttgctccattcaacaaacttcggaacgatatccatctgcagcagctgaaccacaatctgtgccgtaatgtacggtgagacccccatcgagaagatggagtactgggccagtccgccaccactgacagtatccagcagtgagatcaggcctgtcgaaccgattgattgcagcgcctttgcattgaccccgggcactgcgatcagtgtacctaatcgatagaccaataaaaccgctaaagtgaagaggatcttgttacggatgtctttaaccttgagcgcgtttttcagggtcctcagcattagatcacctcaatcgaaccgccagctgcttcaacagcagccttcgctgcagcagaagcctttgctaccttaatggtcagttttttctcaagcttgccgtctgccagcagcttgacgccgttcttttcgttcttaacgataccagcatcgatcaaggctgctggggttacttcggcgccatcatcgaagcggttaagatcggaaaggttaacaacagcatattctttgcggttaatgttgttgaaaccgcgttttggcatacgccggaacaatggcatctggccaccttcgaagccaagacgcgttttgccgccctgacgtgccaattgaccctttgtccctttaccagctgtcttaccttgaccgctagaagtaccacggcccagacgcttgcgggaatgacgggagccgacactcggctttaattcgtgcaattgcatactcttgggcacctccttgtcgaaataatgttattaatccttgatttcttcaacggaaaccaagtgtgaaatctggaaaatcgcaccacgagtggctgcgttgtcaggcttgatcactgagctatttactcgagctaagcctaattccttcacaattttacgttgcttaggaagacggtgggcagcactacgggtcaaagtaatcttcaattgagccatgtgtttacctcctagtcttctaatgatgacgcagaaacgccacgcaattcagcaacttgttcacgggtacgcagttgtgtcaacccgtccatcgttgcccggatcatgttgatcggggtgttacggccgagtgacttgctggtaatatcagcaatgccggcaagttccatgacggaacggatagcgccaccagcagcaaccccagaaccttcttcagcaggcttcagcaaaacttcgccggcgccaaaatggccgataacttcatgaggaatcgttgtgccgacaatcggtacttcgatcaagctcttcttggccgcgtcaacagctttacggatcgcttcaggaacttcttgggccttaccagttgcaaagccgacgtgaccattcttatcaccgacgatcgcgatcgcagcaaaacgcagacgacgtccacctttaacaactttcgtgacacggttgatggaaacgacttggtcttctaagtccaattggtttggatcgataaatgatgccatgtgttggttatcctccttttttctagaattcgaggccattttcacgtgctgcttcagctaacgcagcaacgcgaccatggtacagataaccaccacggtcaaagaccacaactttatgaccatcagcaacagcacgcttggcgatcaacgcgccaacttgtgcagaagcagcagtcttgttttcaggatctttaatgtccttatcaagagtggaggcacttgctagcgtcacacccgctacgtcatcaattaattgtgcgtagatgtttttattcgaacggaaaatgttcaagcgtgggcgctcgctcgtaccagaaatcttgcctcgtacgcgggcgtgacgccgttgccgagtcttgttcttatctggcttagaaatcacaatgttcacctcttgttaaatttgttgaaggttaagactacttaccagtcttaccttccttacgacggacatgttcgtcaacgtaacgaatccccttacccttataaggttcaggtgcacggacggaacgaacaacggctgcaaactggccaacaacctgtttcgagatcccgctgatgatgatctgagtggtgcttggaacttcaacagtgacacccttaggcgcggtcatttcaactggatgggaatagccaacgttcaaaacaagcttttcgccttgtttttgtgcacgatagccgacaccgaccaacttcatttctttcttgtagccttcggtaaccccgacgaccatgttgttcaagttggcccgcattgttccgtggacagccttgtaggaatcatcaggacgcgtgaagttgatctcgtcgccttcctggtgcatttcgatttccggggcaaaatgacgggtcaattcgcctttcgggcccttaaccgtaatgttgtcgccatcttttgtgatggtgacaccggctgggactttaatgactttataaccaatacgactcacttatcggcacctcctttttgatatattgaattaccaaacgtaggcgagtacttcgccgccgacgttcttggcacgagcttccttgtcggtgataacaccttcggaagttgagatgatagcaatccctaagccgtttaagaccttaggaacagcatcacttttaacgtatgagcgcagacccggtttggaaatccgcttcaagccagagataacccgttcattattcttaccatacttcaagaaaatgcggataacgccttgcttgtcatcatcaataacttcatagtcacggatgaacccttcacgtttcagaatctcagaaatgtcttttttcatcttagatgcaggtacgaccaaggattcgtgacgcaccatgttggcgttacggatccgggtcaagtaatctgcgattggatcggtcaagaccattgatttaacctcctttgtctagtgattaccagctagctttgcgcatgcctggaatttggccggcatgtgctaactcacgaaggcaaatccggcagagtttgaatttacgataaacggaatgtggacggccacaacgttggcaccgcgtatattcctggactgcaaattttgcaggccgattgttcttagcgatcattgacttcttagccaagtagcggacctcccttatttggcgaatggcatcccgacttgcgtcagcaattcgagagcttcttcatcagtatttgccgttgtaacgatgacaacatccaacccacgaacacgattaaccttatcgtaatcgatttctgggaagatcagttgttctttaacacccaaggtatagttcccgcgaccatcgaaggacttgggggaaataccatggaagtcacgcacacgcggcagggagacattgatcagcttatccaagaaatcatacatgcgttcgccgcgcagggtaacctttgcgccgattggcatgccttcacgcagacggaagccagcgatactcttcttagccttggtgatcagtggatgttgaccagagatcagggtcagttcgtcaactgcttcatccagcaatttggcgttctgagtcgcatcaccaacacccatgttcaaaacgatcttttcgatcttcggtgcctgcatggtgctcttgtagttaaacttgcttaccaatgcaggagcgatttctttgctataacgttcttcaagacgattctccatgaaaaagtttgtcctccttccctattatttatcgattgcggtgccagacttcttagcaatccgcactttgttgccatctttaacttcagaaccgatccgtgtcggcttattggtatctggatcaagaagcatcacattggacacgtgaataggtgcttccttatcgataataccgccttgcggattagcattgttaggcttttggtgcttcttgatcatgttaataccttcaacgacaactttatcagcgtccttcaagactttagtgatctggccttctttgccggcatctttgccgcgcatgacccgcactttgtcaccagttttgaacttcatgtatcgcacctcctatttggtcagaatgattaaagtacttcgggcgctaaggagacgatcttcatgaaatcgccgtcacgcagttcacgtgccacaggtccaaagatacgagtcccacgagggctcttgtcggcgttaatgataactgctgcgttctcatcgaacttgatgtaagaaccgtcagcgcgacgggcgccagacttggtccgtacgatgacagccttgacaacatcagccttcttgacaacgccacctggtgttgcttgttttacagttgcgacaacgacatcaccgatgttaccagtcttacggtatgaaccgccaagtactttaatcaccaggatttcgcgcgcgccggaattatccgccactttaaggcgactttcttgttgtatcacggaatggtcctcctttcatccgaaaaattgattagatgataactgccttttcgacaatgttcaataaacggaaacgcttattgcgtgataaaggacgtgtttctgcgatccgcacgatatcgccagttttagcggtattgtcttcatcatgcacgtaatacttcttggagtacttcatacgcttgccgtaaacagggtgcatcttgaccgtgctgacttccacggtgatcgtcttgtccattttatctgagaccacgcggccttgataaaccttacgagaattacgttctgccaaggtaaatgtctcctttccgattatttattgagtgcctgttgccgaaggaccgttttgatccgtgcaatgtttttccgaacctgactcaagcgagcggtgttttccaattggccagtcgcctgttggaagcgcaagttgaacagctcttctttatattgcttctctttgtcgagcatctcagcagtggttaatgcagtaatttctttagccttcatttgattgcccacctacttcctcgcgtgaaacgatcttggtacggatcgggagtttgttggatgccaaacgcaaagcttcctttgcgactgcttcggaaacgccaccgacttcaaacatgatcttttcacgtttaacgacagcaacccatccagttggtgcacctttaccattacccatccggacgccaacacctttactggtgtaggacttatgagggaaaatgcggatccatactttcccaccacgcttcatataacgggtcattgcgacacgagcagcttcgatctgacggttggtgatccagtgggattccaatgcttccaaaccatattcaccgaagtcgacgttacggccgcctttagctgcaccgcgcatcttcccacggaattcgcgacgatgctttacacgcttaggtactaacattgattatttccctcctttcacactattttgctttggcttttcaggtaaaatctcaccacgattgatccaggttttgatcccgatacggccataagttgttgcggcttcttcccatgcgtagtcgatatcggcacgcaaggtatgcaatggtactaagccttcattgtaatgttcgcgacgtgcaatatccgcaccattcaaacgaccggaagcttgggttttgatccccttggcacctgctcgcatggtccgttgcattgcttgacgcattgcacgacggaaagcgatccgttgttcaagctgacgggcgatgttttcgccaacaagcttggcatccagatcaggtttcttaatttccacgatgttgatgtgaacttggcggccagtcagcttgttcagctgcttacgcaagttttcaacttcagaaccgcctttaccgataaccatacccggcttagcagtatgaatggaaatgttgacgcgctttgcggcacgttcgatttcgatacgtgatacggaagcatcttgcagcttcttgttaatgaagtttcggatttcaatgtcttcatgcagaaaggctgcaaagtctttgtctgcataccatttggcatcccagtcacggatgacaccgacacggaaaccggttggattaatcttttgacccacgcgttatccctccttatgcttctttttcggatacaaccacggtaacgtggcttgtccgtttgttgattggtgatgcgctccccttggcacgaggacggaaccgcttgagggtcgggccttcgttgacgtaagccttgcttacataaaggttttgtgcatctaagtcatagttatgttctgcattagcgatggcagacttgagtaccttctcgatgatcggtgaaccggatcgaggggtgaattctaagattgccaatgcttcagcaacatcgcgaccgcgaatcaagtcgattaccaggcgcgctttgcgagcagcaatccgaactgtcttggccgttgccgttgcagacgtaatttgatcagccatgaatgttgtgctcctttctagcgtgctgttgtcttcttgtcgtcggtgttatgaccgcggaaggtacgcgtaggaacgaattcgcccaacttgtgaccaaccatgtcttcactcacgaaaactgggacatgcttacgaccatcatatacggcgatggtgtagccaatgaaacttggaaaaatggtggaacgacgggaccatgtacgaataacggtcttcttgtcgttatctgcctgcgcttcaatcttcttcaggagatgagcgtcggcaaaaggtccttttttaagactgcgacccattttgtgacctcctttaatcgatgtaacacttcaatgtgtttacttcgctctgcggtgacgaacgatgaatttctcagacttagccttgtgatcccgggtcttcttacccaaggtcttcttgccccatggtgacattggagatggatggccaattggtgctttaccttcaccaccaccatgcgggtgatcgttagggttcataactgacccacgaactgtcggacggaagcccaaccagcgcttgcggccagctttaccaatactgatcagctcatgttgctcgttaccaacggcaccaattgtggcacggttttcagccaaaatcagacgaacttcgcctgaagctaacttaacggtaacgtacttatcattgtctttacccaacaattgggccgaaacaccagctgaacgtgctaattgcgcgcccttacctggcttcagttcgatgttatggatagttgtcccggctggaatattcttcaattgcaatgagttgccgactttgatatcgacatcttcaccagaataaaccttgtcgccaaccttgagacccttaggtgccaagatgtaagacttaaccccatcttcataatgcagcagtgcaatgtttgcggtccgatttggatcgtattcgattgctttaactgttgcagccatgccatccttattacgtttgaagtcgatcacacggtagaattgcttgtgaccgccgccacgatgacgcacggtgatgtgaccatgggcattacgtcctgcagtatgactttggctgaccagcaaagtcttttcaggctttgtcttggtgatttcagcaaaatcagacccggacatgttgcgccggccgttgcttgttggtttgtacttaataatcgccacgtgttttacctcctataacggatttttgttactttttatcgttatcttcgtcagcgaagatcttgatttctttggaatcggcgctcaaggcaatcaatgccttgcgacgacgacgcgtcatgccttcgtaacggccttgacgcttcttcttaccgcgaacgttcgcgatgttgacgttgacaaccttcacaccgaagatttcttcaacagccttgcgaacttgcggcttggttgcatgcagtgcaacttcgaatgtgtatttacggttatccatttcagccatcgattgctcggtgacgatcggacgtaaaatgatatcgcgtgcttccattatgcaagcacctcctcaatcttttggagcgcagattgggtcaagattaatttcttgtagtcaacaacgtccaaaacgttgataccctctgcaggaacaactttcacgttcggcaggttacgtgcggctttggcagcaacttcattgccgtcttccaacacaaccagtgccttgtcgctgaccttcaagccatccaagacagttgcaaaagcttttgtcttaggtgcatcgaagttcaaaccgtcaacaacgaccaagtcgctatcgagaaccttctgtgaaagtacggatttgattgccaaacgacgaaccttctttggcagcttgtatgcatagctgcgcggggtcggtccgaagacgatcccaccgccacgccattgcgggctgcggattgaaccttggcgggcacgaccagtacccttttggcgccaaggcttgcgaccgccgccagaaacagcagaacggtttttaacggcgtgagtaccttgacgaagggaagcgcgctgcatcacgactgcgtcaaacacgacgttttcatttggttcgactgcccagatggcatcattgagttcaactttgccgttttctgagccatcttgcttatataaagtaacgttagccattagttattgtcctcccttcgtattatttagctgctttaacagcagaacggatcgtaacaaaggacttgtttgcccctgggacattacctttgatcaacagaacattgtgctctgtgtcagcggcaacgacttgcaggttttgcatggtgcgggtgtggttacccatccgaccaggtaatttcttgcccttgaagaccttgttaatgatggccccaagtgaacctggacgacgatggtaacgagaaccgtgcgccataggaccgcgggattggccatccttcttaatgttaccttgataaccgtgacccttggaagtaccagtgacgtccacaatgtcgcctgctgcgaattcgtcagccttaacttcactgccgatttcataatcactaagcgctacatcgcggatttcgcgaacgaagcgcttaggggtcgtgtctgcctttttggcgtgaccgacgcttggcttattcgtcaagacttcacgcatatcgccgtagcccagctgtactgcttcgtaaccgtcagattcaacggtcttgacctgcattacaacgtttggagttacgtcgacaacagtaacgggtacgagttcgccgttatcggtgaagacctgcgtcatgccaacttttttgcctaagattcctttacgtgccatgggtacacctcctattttctaagaattataatttaatttcgatatcgacgccgcttggcaagtcgagcttcatcaaagcatcaactgtcttcggtgttgggttaacaatatcgatcagacgtttatgcgtccgcatttcgaattgttcacgtgaatccttgtacttatgcggggaacgtagaaccgtgtaaagtgtacgttccgttggcagagggatcgggcctgaaattgttgcgcctgtgcgctttgcagtttccacgatcttgtctgcggattgatcgagaatccggtgttcataagccttaagccggatccgaatcttttgttttgccattgtgtgacctccttcgtctattatcagttagtagactagctccgtgaaaattaccaacacgctgccgtggcaaagcggccgggcgtgtcgcaacctctcacatccgcgctactctggttcacctttggaaccaagtgcatagttgtccctttgagaaacagcactcttgatagtatacaaaatctcccccgccattacaaggttttctttcggtttacaaaaaatatgttagaagcaaacttattcctttgaacagctgcttgtgctaaattcaaattaaagccttaacttttgaataaccatagaaagaagggaggcagttgatgaaatttgaccattacaaaaagctcgtcaactcaactttagatattctactcggttttttagccattgtcgtggtaatttttatgctacgctacattctcgatatcggtagtctgatccttcaaccactttcgactgctttgtttggcaaagtcattcaggaagttaccagcttcttcatgctctttgaatttgtgatcatgctggttcgctacattgaggaaggtcatcacattcctatccgctaccttattttaatttcaatgaccgccatcttacgccaactgctcgtgctgcatgaccgcgggactgaaaccctgcttttaaccttggccattttggtattagccggtgtactcacggtgttttcgtttgtcagtggcgatttcaaacagtcgcaggatggtaaaaacgttgatattgaccaacacttttaactttgttttttctcgtttcttctatattactttatacacgcaaaaaaggaaccgcagcgaaaatcattgcggttccttttttgcgtgcgtcgctgattagccaagcgctgatatattcactgttagctgatcaaagcaccgttttaaatcttgccaaccaagtctgcccctggtgtcagtgtcttagcgcccggttgccagttagctgggcaaacctgatcgccgtgagcagcaacgaattgcgccgcttgcaaagtccgtagaatctcatcggcattacggccaataccaaagttattgacggcataggcttgaatcacaccatcgggatcaatgataaaagtcccacggaaggcttgaccgctagcttcgtcacggacatccaacgccgttgccagtttacctgcaggatcggcaagcattgggtattgaatcttcttaatggtgggactcgcctcggcccatgccatatgtacaaactcggtatcctcagaagcagaatagacttcagctccaacagcttggaaccgctcatagtgatcttgcaagtcgccaagttctgtcgggcaaacgaaagaaaaatcggcagggtagaaacaaatcactgcccacttccccttaagatcagtatcactgacttcatggaaatcgccatgttgataggcgttcaacttaaacgccggtaaatgttggccaatatagctcatgatattacctccatttttagaatgattattatttacatattcaccgtaccttttccttatgcaattatcaagcattgccaaaaaaattctgcctttttgtcggcagtcaactttggccacctttacctgtttaatgatgccgatctcctataataaggcatacgagaatatgtgttcacatcacgccgtcatcatgcgcttgccttcccagaaatcgggttggttcgcactcagcaaaaaaccgagtctgcattcattcgcaaacccggctgcacaactgctatcaatacttgccagtatcatcttcgttttgataattcttcaaacttttacgcaagacccaaaccacataatcacgaatatgtttgggagccaggacttttacgagatccccttgcccttggagccacatccggacgccaaaaccatcgttaaccggaatcgtaatgtgataaacctttcttgcgtatggattcttaataaacggacgatcacggacattttcccaatcaacaatggcctcgggaaagcgatcaaggacaaactgcggatcataactgtagagaatttccaaattaatcggtttgcctagatacggataccacgtgtgattctgtaagcgtcccccgcggaatcgctcatcatgatcatgggtcggctgctgacgatgataggtaatattgcgcatatagtcgagccgaaatcggacgaatttgccctcgtctggatcatcatccgcctgttcatcgctgccatcgacaataagatagaagaagagatcgccaaaaaacaagccggttggcagtcgccggtcaaagtgccgcatttcgccgtgatacacgtgatcaaagctgatcagttcgtgattaacgatagcttggctcaatcgggccaaccgattagtcaacgatattttggggacaccacgatactcaaaaactggatttttggtaagccgatccaatcctttgtgctcgggtccggctggtaataattgtgccattagttgcttcatttctacggacgacaagccacggctagccgtcagtatcaaggcaatcgccaacagttgcccgtcgtccagactgcggccagcggcgtgcaggtctggcttgagtcgataatccccagaacttgcagcaataaatggcgccggttcactgaacacatcgtcaaaggcacgtttgatgacgctaatatcgcggcgaatcgatgattcatccttattgaattccgtcatgagcgcttgcttattgagttgatcgcctcgcagcaagcgcaataaaatggtcgtaatacgctcctgactcgacacgctgcttcgccccctaacgcttatagaataacatcagtatactataatcttttcccaagcccagcaatcaggttcacgattttcatgcttatttccggattttgacttctggcgcacttttagaaaaaaacgacgatgcctaaaaggcatcgtcgttcatgcagctggtaacaatcaaagactagtctttggttgcgacgccgccgccatttttcttgatgatttctgcttgaatgctctttggaacagcttcgtagtggtcaaaggtcatggtaaacgtaccacggccttgggtagcactacgcagggtggttgcataaccgaacatttcggcaagcggcaccatggagttaaccaattgggcattcccgcgggcttccatcccttcaacgcgaccacgacgagccgtgatttgtcccataacatcgccaagatattcttcaggggcaaccacttcaacgtgcatgatcggttcaaggataaccgcgccggcactcttcgaggcattcttcaatgccatagaagcagccactttaaaggcagcttcagaagaatcgacttcatggtaagaaccatcataaagcttagccttaacgtcgattaatggataaccggcgaggacaccattggccatggcttccttcagaccttgctcaacagctgggatgtattcacgaggaacaacaccaccgacaatggcattttcaaattcaaagcctttgccttcttcgtttggactgaattcaatccaaacatcaccatactgacctttaccaccagactgacgaacgaacttaccttgcgcggaagtttctttagtgaaggtttcgcgataagcaacttgtggttcaccaaccttagcagcaaccttgaattcacgcttcagacgatcaaccatgatgtccaaatgcaattcgcccatgccggcgattaatgtttcgccagtttcagggttggtttcagctttgaatgttggatcttcttcagaaagcttttgtaagccgacatccagcttatcttggtcttctttagagtcaggttcgatggaaacttggataaccggatcaggcacatccagagattcaagaatcagcgggtggtcaacatcagtcaaggaatcaccagtagtggtgttcttgagaccgatagcagccgcgatatcaccagagaaaacttcagggatttcttcacggtgattactgtgcatttgcaacagacgaccaacacgttcgcggttatctttagttgcgttcagcacgtaagaaccggcttcaagcgtcccactataaacccggatgtaggttagacggccaacgaacgggtcagtcgcaaccttgaaggccaaggcagcaaacggcttgtcgtcgccagcggtcaattcaactgcatcgccagtgtcaggatcggtcgcatgatatggccgaacatcaagtggtgatggcaagtaatcaatcacagcatccaacaacatctgaacacccttgttcttgaaggcagaaccagccaaaactgggtagaattccaagttgatggttgctttacggatcgcagccttcaattcagcattggaaatctcttcaccttcaaggtacttgtccatgatgccgtcgtcaacgtcagcaacggcttcgatcaagtcgttatgcgctttttgagcagcttccttgtagtcatccggaacatctacagtgtcccacttggtacccaattcatcttcgtcatacaaatcggccttcatttcgatcaggtcaatgaccccttcgaacttatcctcggcaccgatcggcatctgaacggcgtgagcgttagcctgaagccgatcatgcaatgtcgtcatcgaataatcgaagtcggcaccgatcttatccattttgttgacgaaaaccaaccgcggaacgccgtatgtcgttgcttgacgccaaacgttttcggtctgcggctcaacaccggattgggcatccaaaacggtgatcgcaccatccagcacacgcagggaacgttcaacttcaatcgtgaagtccacgtgtcctggggtgtcaatgatattgacccggtgatccttccagaaagccgtagtagcagcactggtgatggtgatcccacgttcctgttcctgtggcatccagtccatctgtgaagctccttcatgagtttcaccgattttatgaattttaccggtataatacaaaatccgttcagtcgtggtcgttttaccggcatcgatgtgagccatgatcccgatattacgggtacggtctaacggaaattcacgtttgttggccatgtggcgtattgctcctctcttgtttcaactggctttatacaaagaatggctactatataccaagccgcggatataatagccaaatcatcttaccaacgataatgtgcaaatgctcggttggcatctgccatcttgtgggtatcttcacgcttcttcacagcggcaccggtgttgttagcggcgtccatgatttctttagccaagcgttcgtccatcgtatgttcaccgcgttgacgggaatactgaacgatccaccgtaggcccaaggtggtccgacgatccggacgaacttcgattggcacttggtagttagaaccaccgatacggcgagctttaacttccaagaccggcataacgtttttcattgcttcttcaaaaacgtccaatggttcgttcccggtttgtttcttaatcatatcaaatgcatcatataaaatagttgatgccttcccgcgcttaccatcaatcattaagtggttgatcaagcgagttaccagctttgaattgtaaactggatcaggtaaaacatcacgttttgcgacactgcctttacgtggcatgcactttgcctcctcttaaacgtgctcgctgacgcaaaaacctgcacataaggaccttggtcgcaatggtcaaaaaccgaccatcacgcctaagcccacttatgctccggtttctaccgcgccagctcacgctctgtctataccgcacatagcggatctaaaaatttttaatagcgatctttaatgttgatcgtgaattacttcttcttagggcgctttgcaccgtacttggagcgaccctgcatccggccgtcaacaccagccgtatcaagcgcaccacgaacaatgtgataacgaacccctggcaagtccttaacacggccgccacggatcaagacaacactatgttcttgcaagttatggccaatacccggaatgtaagctgtcacttcaattaagttagacagacgaacacgggcatatttccgcaatgcggagtttggcttcttcggtgtcatggtaccgacacgagttgccaccccacgtttttgcggtgctgggttattggtaaggctcttcttcttgctgttgtaaccgaagttcaacgcaggagagtctgacttggttgaaattgatttacgaccttggcgaactaattgattaatagtaggcattaagcttctccttccttaatttacatcattttataagtccacacatccaggcggttcattttttctgataaaaaaatggccaaccgaacggcaacggctcttaacccagtcagcacgtccgggcaacccgaataaactggaaaaaagcacctttgatagtgtactatcctttgcggctgagtgtcaagagaaaaagaaagggcggggtgactcgcgcgacaaattcaaagatttgtattagttctatttgagtcgcgtgttctcgattgtccgagttggctacgcggcgaggagggctggcgaccgcgaagctagagctgtgggcacagctttgaactcgcgcaaagcccgcacgatttcaaaagtctggccttgttctaaaacgggaaaaccacccgtttaagaacaatatcacggctgagccccctcaccgctccgccagctctcatggctctattcttgaattcataccttttaagattagcatccccccaatcaaagaagtggtgagccgttctcaaatagcagattcaccggttgtaactaagttgttactttttcaataaacacagtttatcaaccgctttaatcggccccgaacgcgccatacccctaaccataacaaaatagctccgcaaagcaagtctccggctagaagactcacctcgcggaactattgtaacgtgatgccgttcagtctcgaacagctcgtgtcaattgattatgatcgcttacgccgccgcaggatcacggtgctgccggcgatgacgagaatcacgatgcctaaaaggacaagggtaatcgcatctcgatcaccaaagctgccgaagagtaagcggcgtgacggttggtcatggcgcacatcgttaccattgttcccaccttctgtacttggcagaacatggcgctggtcggcgattgtcatgcggattgtatcaccgctcttaatatcaactgcgaccggctttgcgtagtccggattaatcgtgtacccagccggcgctttgacctcggtcagccagtaacgacccagtttcaggttatcaaaggtgaccagcccattgacatcagtcgtgaattccttgctataaccgttgtcatttgtcagtcggaaaacggcacctgctaagacttgattgctatcagcagcatccaccttcttgatgacgagtgaattgatctgatagttggcaacctgtacagtaaccggctgctgcttattctggcttgctagcgcgctcacggtttgcgtcaggtcggtttgttctactttaaagtcgatcttgtcggtattcagttcatatttcggcaaggtcttggtttcttcaaagtagtagtcgccgattggcaagttaaacggcaggttgatctgcccggcttcatccgtgacaagatccttggcaaggacattgccattgctaccatataagtcaaaggtaatgccggccaaatgattgccaaaattaccatccgtcttttgcagctgaatggcgcgtctaaattcgggttcgataatcggatcaagagcaactttttggtcgcccttgacgttcacatcaatccccttggccagatcatctgggataacgtagccgcgtggtgcctgcgtttcaaccagcaaatacttaccttcataaagatcatgatcattgaaggtcacaatgccattctggttggtgatcgttgttgtccatgcgtgactgtgatcaaccgtgccgtcttcgcgataacgatacatcgcaaattgggcgccaatcatggtcattttgcccggaagcgatcatcggttgtggtgtccgccttcttcgtcacaatgatttggccagccttcttctggttagttgcggtcagcttcagctgggtttgatcagtcttgatggtgaaatcgacactaccagcggccaaactatcttcccatcgttgcttctggacgccgcttgtcgcgttagcttgatcagcagcatccccttcataatgctcaggggcttgggtttcgactaggcgatacgaattgtccggtttcaacccttcgatcgcgtattcgccattcttgagtgaggtgtcaaagctgcttgctgcgccaaaggtcaattgcccttcagtgttggtcttcatgtcggccttcaacgtttttttggttacggcatccacaagcttatacgtcgctcccggcaacagatactgcttgcgtgttgccgcatcatcggtcttcttaacccagttatcgtacttagttaaggtgacttgataaggatcgtcggcaatttgcttgtcgatggtgattggggtcggcgtgatcgctgaggataaggtgatcgcatgaacggtcttgtccaaccgatacccagctggcgccctcacttctgtcaacgaatagctgccgagtaggagatcgccgaatgaggccagcccgttttcgtcagtggtgatgtcacgactgtagccggcactgttggtcagccggaaaacggcacccggcagcacatgagccgcgaaagtgcgatcaacttttttgacattcagggttttgacttgatagttggtgacgttgacgcgaatcggttgttgcttattttcagttgctaaactgctggccgtttgcgtttgatcagtctgcttgacttcaaaagcatgtttgtccgtatttggccgatatggcggcaaggtcttcgtttcctgaatataataatgaccaactggcagactaaacgggacattgacttggccatttttgtctgtcaccaaatccttggctaactcagtgccgtcttcgcgatacaacgcgtacgtaatgccagcaattggattaccaaagttaccatcggtcttcgccacacttaccgtccgacggtaaaccggttcggtgatggttggcagcgttaaggtttgatcgccagtgatatcaacgtcaacgcccttggccagttcatctggaatgacatagccatcaggagctttggtttcaaccaactggtacttgccttcatataaatctgaatccttaaaggagacggtgccgtcattgttagtgatggtagcgtcccatgaccggctgcgatcaactttgccagcttcgtcataacgataaagcttaaattcagcgccagtcattggttgacgatcagggaagtgatcatccttgatggtttcagcttgtttcttaagatccagctgacccggtttcttttggttcgttgcggtcagcttcacttgcgtctgatcagccttgatattgaaatcaacactgccagccgctaagctgtcttcccacgcctgtttctgggtgccgcttgtcgcgttggcttggtcagcagcatccccttcataatgttcaggtgcttccgtttcgaccagccgatatgaggtatccggcttcaacccttcgattgcgtattcgccatccttgagcggcgagtcaaaactgcttgccgcaccaaaggtcagttgaccatcagcattggtcttcatgtcagcctttaaggtcttgttagccgccacgtcgacaagtttgtatactgcgtttggtaacagatacttcttttgactcgccggatcatccttcttgacgcgattatcatacttcgtcagattgacctgataaggatcgtcagcaatctccttattaaccgtaatcgctgtcggcgtttcggcagatgacaacgcaattggataaacggtgttgtccaaccgataccctgctggtgccttgatttcagtcagcgagtaactgcccaacagcaagtcgccaaatgaggcaatcccattttcatctgtcgtcacgtcgcgagtgtaaccagcactattcgtcagccggaagacagcccctggcaacacatgagttgcgtaagtgcgatcaacctttttgacgttcagggttttggcttgataattggtcacattgactttaatcggatgctctttgttttcggtctccaggttgcctgccgtctgggtttgatctgtctgcttcacttcaaacggatgcttatcgctgtttggccgatatggtggtaaactcttggtttcctgaatatagtacttgccggccggtaaattaaatggcaagttgacctgtccattttcatctgtgactaagtccttggcgatctcagtcccatcgttttgatacaacgcgtacgtgatgccggcaattgggttgccgaagttgccatccgtcttagccacttgcaaggcgcgtcggtaaactggctccgtgatcgtcggcagcttcagcgtctcgtcaccagtgatattaacgtcaacacctttggcaaggtcatcggggatgacataaccttcaggcgctttggtttcgactaactgatacttaccttcatacaaatcaggtgaatcgaagataaaggtaccatcttggctaatgatcgttgcgtcccaagatttgctttgatcaaccttgccgtcatcgccgtaacgataaagcttaaattcggcgccggtcattggctggcgatcagggaacttgtcgtcagtgatcgtttctgcctgcttcttgatatccagttgaccaggtttcttctggttatacgccgtcactgtagcggacggcgccttgttagaaatgatcgccgccacgctgccggctttcagactatcttcccaaacctgcttgtcgggtccgctggtaatcgtcgcttgatcatgcgcatccccgcgataatgatctggggcttgcgtttcaaccagcttgtaattgcctggcttcaagtcttcaaggacgtattcgccatctttcaagtcaggggtgaacttgtcgccagcatactgacctgaaaagctgctagccgttccaatggtgattttgccgtcagcattggtcttcatgcccgacttcaatgttttctgcgtatcggtatccactaagtcataagtggcgccgggaagcagatagtgtttgttatctgtttctgattggcccttagcgcggttgtcatacttcgacagcgtgatctgataaggctcgttttcaaccgcctccgtttgaatcgccgtgcctgtgtcggaagttgcgttcaaacgaatggtctgtggtgccaatggcttatacccagctggcgtactgagttccgtcaacgtatagtcaatcccaattggcagtccttggaaagttgccagtgccttattcgtggccgaatcaagttttgtggtggcttcaaatgtatgggtgccgtcacttaagcggaacttaacgcccggaattggcgtgccactgacgctatccttcttttcaaccactaagttggctaattgcgtgagggtctcgccgctgataccggaaccccaataaggcaagtacccatttgcgtttgcaattcgcgcatcaggagggacaccatcacttggcttttgagtcgtttggctgccatcccattcaacgctactcgaattgtatgcccatcctgaactcttgctacttgttgagtatgcaacgctcacttcgtaattattgagcggactattggccgtttggacgagattgccaaaagttcgattaaaagtaattgtaaacttcttgccatctagagaaaggctgtaatccttcccttcttcaagcgtatccgggtcagctataccaacctttagtgtcaccacaaaactggtagcattgatttctgctccagtacctcttggatccaaagtatcctcaatgactggattcaccattggtcgatacttgtcttggatattgatcaaattcactttccaattcaagacattttttagtttagtatcagcactaacagttttgctgatcggcgtccaataactttgtgccgactttgaggctgacgggttgaaagtaggaattgccgtggtcggttcggtatctgtcacagtcgcattgttggcgaagttaggatcgttatagttccactggttagcgcgcatcgtcttgaaaacaacccaaacacgccccgtaccgatatttggaaaatcaaaatccaattgttgtgctaagtttggattgttcttgagccacgtatttggcgtgttggttggtaacagatgttgctgtgctgcatcctcagctttaagtgctgttgatgaccagccaccggttccataatatggactcgtcttgatttctttcacatcgttagaagaagctggatcacctgtgttcgatggatcaactccgtctggtcccgtgacttcatagaatttaatcgaatcaggaatcaactcgtaattaacgccatcaaaccgcggcaaaatatcggtcaggtgcatgtggccatatggaagccccaattggttaaccaagacaccccaatactgggtatcaggcgcgtcactccaagaattcttcaaggctccgctaaaggccccttcttctggtgttggtgtactactactatcaccgctggcaacgtcatcatcacctggtggcaagtcaaagaagaaaaacgcgcgattatttaaagcctttttcaaagcgtctgggtcgtgaccgacttggcctagcttcaacatgtccagcttagtatgcgtataaatcacaatttgcgaatctgtttctgcatacgcccctttgagcgtgacgacaaagccgcgaatgcctttttcctgaccattcgcattaatcggatttgtcttatccttgtcgttatattgcttaactgcagattgaacgtcagcgtcttgggtactcatatcgtaatcagtccccggcttcagcaacgttcttgcgccgtccggattctgagcgtagacaagaataccgtcattagcgccgtcgtcaacatttgctgagacattttcaccggagatggtgttgatgttatcggccgttggatcgttgtccagcttatcgaccccatccgggaaaaggtcgaagattttaccattcttcatgttccggaaaacgcggttggcattgatccgccacgtcatttgaccattgtaggcatcaatcttgccgcctacttttgtaatcccgcttggcagcctaactggataggtcgcatgatcgtaatgattcttctgatcattcacaatattggttaagttgtcgccatttttcggtgtgttcttcagtttcgtttgatattgaatctggaaagaagcattttccgggagatcgccgccgccaagataagttagtgtgaactcgccgtcgcctttttcagtgagcttaaagtactgcgcgatgtcgactttggaaacaatcggcgttgcccactcgtcaaacgtgacttgaaagaccttcagggacttcgtgtcaaaggtttgattgccatctgtctcgatgttgggttgatcatgctcatctttcccgctggtttgcttaccaaagcgatccgttagcgtggcgccagccttcatggtatccatgctgtaattccaattaattttccagttaagtgctcggaagttattggtaatatcgccagatttggtgatcgctacaccggagttgcgcatggtgacactatcatagtcataaccgtcagacgactgtgaaccagttaagtaacgatagccttcaactaaggcactgcccactttcccggtatcgtctaaagatcggtcaatcgtggccgtataatctacctgatacccagttgtttttttaaagccgcctgtcagataaattttaaccgttcgtttgtcatccgataaaacagcatgaaaatcttggccggcgactaacggcttaagttcttcagaaaagccgccgagaatattgactggtgccgacgagaccttgatcttcgccagatcgctgtcgctaaaggtcagcgatttgagataatctgtcccgctgcctcgtgccgtcagtgtcaatgccatgtcagcgttctttgatcgtttagccggatcactgtcccactttgtcggatcggttttgctggtttcgttcccgttcaaattaaacttcgcggtcccagcaatgccagtcggattcaagctttgtggtgtcgtcgtatgcgcatacaccaccaccggcttggcattcgacctaaacgtgattggaaactttgtgtcctgatcttttgtatggaaaaccagtgtctgattgagtgaatcattagcagttaaagccttaaagcttgctgcaatatgcactaaccaagaaccattactcgtggctttcaaaagtttgatcgtcagctgtcctgtggttgcgtcaaaatagtacgaggcgacatcaccggaaaagttgccgccgccgctttcaggaaaagcaatctgatcctttggcaaggtcgttgtaaaggatgcccctgccggaaacggggtgctcgttgccggtaatgtaaaggtcatctccatcttcacagcactttgctgatcgacttccgttcccaaaggctgatcattgccgtccttcagcgccaccttcgtgaaaatattgggcagctcagtatcggcctttgcgtccggtgtcgcgcttggttcagcttctggcgtcttcgctgccgctggttttgcggctgtgctactgctactgccgctatcaagtgtggctgatgcgcggctcttaaacagtagtgtcacattgcccgatgccgtgacactgaaatttttcgtctgctcaagagctgtgtaaccggaaacagactgtttttcggttaccgtgtaatttccgaccggcaagtttagtaccgtcgcctggccgtccttactaatctcgctattcgccactacctgatgcgattcattttgaatctcatacttagcgccgtttagcggtgatccttgttcatcttggttcttgatcgtgagcgtaccagtcactgcctgtgtcggattttcggctgcaagggctagtgctggcgaaatcagttgcacaatcatgccaaggatcaccgttaagtaaatccctactttaagcatgaagtgcccggttttcttgacacctaactccctcatttttctcctcttcctcctctttacaaacctacttggtatctccccctgagaccattaacctataatttatggatacattaatttacgctccgctcaatatcattgtataacatttctataaatattgaagggattataaagaatattcattaaatatatatgcttatgtttattcttttcacccagtgctgatttgcctttaaatccttacacatcaggtgttacagccaattaaaaaatgtactgttagacagggctattaaatgtcgattttttccagaagttgatagcgttaacaatagaactttttcagtccattatcatctactttttacttgtgcaagaagaaaaacaaatgcgaaatctgcttcatgaagaggtgaatgctatgctaataaccgtacttttgctcattgttctgtacttagttcgtcagcacagcttggcaacccgttgttttcactgtctattagccgtcctctttggattaagcatccatacttggttaacttttttgcttgcctcaggcttaatcatctttagcgtggctgactggcatgagcgaacggttcctttcttcagctttactggttggtgtttgactttgctggtttgttttccccatgaccttttcggcatgatgctacttgctgtcatgattggcggtttagccgttgtgtcgcaaggacttgggagtgcggatgtgatgttaattgccttgctggcctgcgttttacgactcgaggcagcgttaatcgtgacactgatcgcttgcggaaccgcctgcctgcattggatagctgctcgcccgccgagtttgccaatgatcagtcatttagcggctggttatgcgtgctttgctctggtaaatggcggaccccagtttacaattcaagtgcaacaccctgacgactagaccataaaggccatgaagacctattcttgttagtgctagctaaacaagaaagcaggaatcttcatgacccactctcagactaacacccacaagcattaccaacaactcagttttagcgaccgtgctacaattcaggcccttcaggctgctggtgacaccgcgaccgtgattgcacagaagcttcatcgcagtaaagcgacaatctcacgagaaatcacgcgtggatctgtaactcagctcgactcgaagcgtcactcgcatcaagtctatcttgcggaaactgcccaagccatgcacgaccgtaaacgcgatagaaccggtcactacgcctttcttaagaccggccgtgcgttcttcaaggctctcgccagggagcttactcgtaagccgcgcgtacacagcgttgatagcttcgtacacttctatcgcgaccagggcaaggcttgcccttcaacgacaactgtgtatcgctacatcgacgccgggctgcttgagctagacaacatgacacttcccaagaagctccgacgccgcatcaaaggctataagaacgcccacaagcgcaagaataagaagatatacggcgactcaatcgagttgcgtcctgcggccgtgaatgaccgcacaggcgtgggacattgggaaggcgacttggtcaaaggtattcgcttagctgatgagccagcattaatgacgctcacagaacggtacagccggactgagatcatcgtcaagattcctgactatcatgcgggcacctgccttaaagccttgcaggacacgatcgacgactacggggccaaggaatttgagagtatcacttttgacaatggttccgagtttgccaagttatcagagattgttggaacccagatttacttcgcacatccgtactcgccttgggagcgtggcacaaacgagaacgccaatggactgcttagggaattcttcccgaaagggaagtctctcagagcaattaccctggttgaaattcaagcagtccaatccgcactgaaccatcgtcccagacgtattctgaactatcttcgcccatgcgattactaccgatgcatggcgtaacagcctagaccactatcaagaattcgttatcatcgttgcacttgccttgaaaattgaggtggtaaatggcggactataacgcgctcgcagtcgcagaaacctacacgtaaggaccttgaagctcagtgaccaccccatgtcattcagcttcaaggccacttacgtcccagtttctaaacgctcctactcgcgctcaccaaaaaagcggcgcaagcatcttttcagatgtttacgccgcttctttttggtttaactgtcagttcacgcgattactttttgtccgtatcgccttgctggccgtcttttgctttcatttgcttttcgatgtctgaaatcgaatagacactgtcggaaacggtgccgacactctttggttcttcgtgtcgatacgttgccatcccggtaccagccggaatgatcttcccaatgatgacattttccttcaaaccgatcagcggatcgttcttgccgcgaatcgaggcatcggtcaatacccgtgtcgtttcctggaaggaagcggcagacaggaaactgttggtctccaaggaagccttggtgatccccagtagaactggccgtccagtagcagggataccgccactgataattgcctgcgtattcttttccttaaagtcagcaatatcgagtaaggttcctggcaagatgttggtgtcgcctggatccataacccggatcttgcgcaacatctggcggaccatcacttcaacgtgcttatcgccgatatcaacaccttgcatacggtaaactttctgaacttcagaaagcaggtaattttcagtggccatgacatcgcgcactttaatcaattgcttaggatcaatcgaaccaccagtcaggcgttcgccacgattaatgtggtcgccttcagcaactgccacactggaagcatatggcacgctgtaagtccgggtgtcggtttcacctttgaccgtgatttcccgtgtatgctcagctggattttcgtcaatcgccgtaatttcaccggtcacttccgtaatcacagcttcacctttagggttacgagcttcaaagatttcctgaacacgaggcagcccttgcgtaatatcttcgccaccggcaacaccgccagtatggaagttccgcatggtcagctgggtaccaggttcaccgatagattgcgcagcaacagtcccgacagcttcgccgacttcaacttgttcgccagtggccatgttacgaccgtagcacttctggcagacaccatgtttggtgttgcaagtgaagaccgaacggatcgtgacggattcaaccccggcatccacgatcatctgagcagtatcttcgtccatcaaggtattgcgcttgacgagcacttcgccactcttcggatccagcacatccttcatggtgaaacgaccaaccagtcgatcatacaacggttcgatcatttcattaccttcacggatagcactgacaactaagccacggtcggtaccgcagtcctcttcacgaacaatgacatcctgtgcaacatcaaccagccgccgagtcagataacctgaatcagccgtcttcagcgccgtatcggtcatccctttacgagcaccgtgagttgacatgaacatttccatgacggacaggccctcacggaagttcgagataacaggcacttccatcatcccaccgtttggcgcagccatcagaccacgcatgccggcaagctgtgtaaagttagaaatgttaccacgagcacctgaatcggacatcatcgaaattgggttgttcgggtcaaacgaatcaaccagcttctgctgaatatcatctttggcatcattccagatctggataacccgatcatgccgttcctcgtcggtaatcaacccacgacggaactgcttggaaacagtggcaaccttcttatgggcagcttccacaatttcaggcttttccttcaagttagtaatgtccgcgatcccgacagtcaagccagagttagtggactgcgtatagcccaaagtcttcatatcatccagcaagtcactggtccgttgaactttatagaccttgaagacttgcgcaatgatgtcagacaggaagcctttcttgaatggatcgattaacggtgcatcttcaaggtagtcgttgatgtcttcacccttatcgatgaaatacttatccggcacaccattgacgatgttatcctgcgtcggttcattcaaatatgggaagtctttcggcataatctcgttaaagatcgccttaccaacactggtgaccatgatcttttgtttctgatcatcggtaaacggcttgtccgtaaaggaattagtcgcaatcccgatgcggctgtgcaagtggacataaccgttttgcaaggccatcaacacttcgttggtgtccttaaagatcatgccttcaccttcgcggcctttttgttccatggtcaggtagtagttacccagcacaacgtcctgtgatggcgtaacgattggcttgccatcttttggtgccaaaatatggtgtgcagccaacatcagcatccgtgcttcagccatagcttcgtcagatagcggtacatggatcgccatctggtcaccatcaaagtcagcgttataagcttcgcagaccagcgggtgcaaccggatggacttcccatcaacaaggacaggttcaaatgcctgaatcccaagtcgatgcaaggtaggtgcacggttcaacagcactggacgttccttgatgacatcttcaagcacgtcccaaacatcatcatcttggcgatcaatcttgcgacgagcatttttgatgttgctagccatgtcgcgcttaaccaattcgcgcatcacaaatggcttgaacagttccaatgccatttcacgtggtacaccgcattgatagaacttcagccatgggccgacatcaataacggaacggccggagtaatcgacacgcttaccaagcaagttctgacggaaccggccttgcttccctttcagcatgtgtgacagggacttgagcgggcgattacctggccccgtaaccggacggccacgacgaccattatcaatcaaagcatcaaccgcttcctgcagcatccgcttttcgttttgaacaatgatacttggcgcattgagatcaagcaggcgcttcaaccgattatttcggttgataacccgtcgatacaagtcgttcagatcggaagtggcaaaacggccaccttcaagttgaaccattggccgcagatccggtgggataactgggatcgtgtccatgaccatccaagctggatcattaccggattccttgaaggcatccagaatatccaaccggcgaatcgcacgggtccgcttttggccttgggctgacttcaagtcttcctttaattcggcaacttctttatcaagctcaacatcctgcaacaattccttgatggcttcagcacccatcttggcattgaaggtttgaccgtattcttcgcgtttttcacgatattcacgttcggtcaggagctgctttttctccatcggcgtatcgccaggatcgatcacaacgtaggatgcaaaataaatgatctcttcgagtgaccgcggtgacatgtccagtaccagacccatccgacttgggatgcccttgaagtaccagatgtgggtaaccggtgcggctagttcgatatgacccatccgctcacggcgaaccttggaacgagtaacttcaacaccgcagcgatcacaaacgattcccttataacgaatacgcttgtacttgccacaggcacattcccagtccttggtcggtccgaagatgcgttcatcgaacaagccgtcccgctcaggtttcaacgtccggtagttgatggtctcaggttttttaacttccccataggaccagctacggattttatctggcgaggctaagccgatttgcatactttcaaacttattgacatcaatcaaagggctaacctcctatttcttatcgtcggtactgttggcagacttaccgtcagttgcttgtgctgcggcttcgtgagccttcttttcttcctgctgagcagcaaacttcgccaaggcatcgacagaaacaatgtcatcctcgtcgtcgtccatgtcccgcagttcaatttcttttttatccgcgccaaggaccttcatatccagacccagtgcttgcaattctttgacaagcacacggaaggattctggtacacccggcttaggaatcggttcgcccttaacgatggcttcataggtcttaacccggccaaccacgtcatcggacttgtacgtcaggatttcctgcaaagtataagccgcgccataagcttcaagggcccaaacttccatttcaccaaaacgctgaccaccaaactgagctttaccaccaagtggctgttgggtaactaaactgtaaggtccaatggaacgagcatgaatcttatcgtcaaccatgtgagacagtttcatgtagtacatgattccgacagaaacacggttttcgaatggttcaccagttcgaccgtcatacaagacagacttaccatcagatgccataccggcttccttaacggttgcccacagatctttatcattggcgccatcaaaaacaggcgttgcaacatgaatgcccaagttacgtgcagccatccccagatgcaattccagcacctgtccgatgttcatacgacttggcacacccattggtgacaagcaaatgtcaactggggtaccgtctggcaagtatggcatgtcctcttcaggcacaacgacggaaaccgtccctttgttcccgtgacgaccggccatcttatcaccgacctgaatcttccgcttctgcgtaatataaacgcggaccatcatattcacaccaggagacagctcatcgccggcttcacgagtaaagatcttaacgtcttgaatgatcccgccgccgccatgaggaacccgcagcgaggtgtcacgtacttcacgtgctttctcaccaaagatcgcatgcagcaaccgttcttcagctgacaattcagtaacgcccttaggtgtaaccttgccgaccaaaatatcaccgtcacgcacttcagcaccgacacgaacgacaccaaattcatccagatccttaagggcttcttcaccgacgtttggaatttcacgcgttacttcttcaggtccaagcttggtgtcacgtgcttcagattcatattcttcaatatggattgaggtgtaaacatcatctttaacgagtcgttcggagagcacaatcgcatcttcgtagttgtacatgttccaagtcatgaaggcgatgatcgggttttgtcccaatgccaattcaccattttgcatggctggtccatcagcgatgatttcgtcaacatcaacatgatcgccgatggtcacgattggccgctggttgtagtttttaccggcgttactacgcttgaatttcatcaagttgtaggcatccaaggcaccatcttcacgacgaacccgaatttgcttagcatcaacatattcaacggtaccagcgttattagccaaaaccgctgtcccggagtcatgggctgccttgtattccatccctgtcccaacaagtggggcatgcggattaaccaacggcacagcctgacgttgcatgtttgcacccatcaaagcacggttggagtcatcgttttccaagaaaggaatgcaagccgttgcgaccgcaacaacctgtttaggtgaaacgtccatgtagtcaactttgtctggagagatttcaatgttgttatccttgtgacgagccagaacggtttcgtcaacaaaggaaccatcgtcgttcaaaggcgagttcgcctgcgcaacgatgtagttatcttcttcatcggcagtcaaatagtcgattttgtcggtaactttatgcgtatcccaagaaacacgacgatatggcgtttcaataaaaccataaggattaacaaccgcataagaagcaagactgttaatcaacccgatgttcgggccttcaggcgtttcaatcggacacatacggccataatgggtgtagtgaacgtcccggacttcataaccggcacggtcacgcgtcaacccaccaggtccaagagcagacagacgacgcttatgcgttaactcaccaagcggattcgtctgatccataaactgcgacagttgggaactgccgaagaattccttgatagaagctacaactggccgaatgttgatcaattgttgcggcgttaccgtagcggtatcttgaatggacatccgctcacggacaacacgttccatccgagaaagcccgatccggaattggttttgcaacagttcaccaacggaacgaatccgccggttacccaagtgatcaatgtcatcaattgaacccaagccttcctgaagattcaggaagtagttcattgatgccaaaacatcagcggggacgatgtgcttcacttttttaccaatatgaccattaccaatcaaattgatttctttatcaggggtcacttgtgagtatactttgatactctgtaattcgatcggatcagtgacaacgccttgatcggaaggttggtaggtgatggtcttgaaatcgtcgcggtcaagatatggtgccaacttgtccatcacttgacgatcaaccttggtgcccttttgcgcaatgacttcaccagtatcaggatcggccagtgtttctgccaaaacctgattcaaaagccgggtcttaaggctcagcttcttattcactttgtaacgaccaaccgaagcaagatcataacgcttcgggtcgaagaagcgggcatacaaaagagaccgcgatgaatcggctgtttttggttcaccaggacgtagacgttcgtagatatccttcaacgcttcgtccgtacgggaatcatccgtgttcttatgcacatctttttcaagcgtaagcatcaaggaatcattgtcaccaaacatgttgataatgtcttgatcggaaccgaagcccaacgcccgaaccaattcggtcagcgggatcttccgtgtccgatcgattcggacatacgcgatatctttggcgtcagtttcatattcaagccatgcgccccggttaggaatcacggttgtgccataagtgacacgtgagttcttgtctgtttcgctatggaaataaacgccaggtgaacggaccaactgagaaacgatgacccgttcggcaccattaataataaacgtcccttgtttggtcatcagcgggaagtcgccaaagaacacatcttggctcttaatctcgcctgtttcatggttggttaaacgcaaggtcacatgcaacggtgcagagtagtttgcatcgtgttggcgtgcttcctcaacagtatattttggttccagcagttgatagccgacaaattccagtgacagtttcccttgaaagtcatcgatcggcataatatcgtcgaacatttctttgagaccttcatcgaggaaccattggtaagaattcgtttggatctcgatcagattaggaagatccaaaacttccttgatccgggcataggaccggcgtgtccggtgcttaccataattcactaagtgtcctgccaaattattcaccccttgtaagattttccggcttaggttgattgtaaaaataatgtaaatattgttaaatttacatgacaacgaccatcccgcagacattttgagcaaaaaaaaaccaaaaacagatcgaccttcaaccagcctgctgtttttgctttttcattagccagaacggacaatagatcgtcctgacagcctgtccaaaccgaaatgcgattagattaataatacgcgtatcaatcaacgatgtcaagcggaggttgatccgtgctgcgcaagcaaagccaaaaagaaatcgcaacctaacagccgcgatttcttcattatcaacactaggctttaacgggttcttttgaagcaccgttttctttttgcttgcctttgttctctttaacagtaaatgtcagcttgccttttttagcaccgatttggatcaagtcaccggttttagcttggcctgtcaataagagttcacttaactgatcttcgacaccggtttgcagtgcccgccgaattggacgtgcaccgtactctggatcgaagccggcagcggcgacagcgtcaataccggctggggtaattttaacgtcaatcccttgatccttaatgcgactaagcactgtcttcgtcatgatcttaacgatttcatgcagctcagccttgttgagactgtggaagaccacggtttcatcaattcggttaaggaattctggtcggaacgcttttttaagttcgtccagcatccggctcttcatggcattaaagtcagcttgtggatccttggcaccaaagccaacagtcttatcgtcacgaatagcggttgcgccgatattactggtcatgatcaaaatcgtgttacggaaatcaacccgccgaccttttgaatcggttaaatagccatcatccagcacttgcagcaaaatgttaaagacatctggatgcgccttttcaacttcgtccaacaacacaaccgagtaaggcttgttgcggactttttcggttagttgaccgccttcgtcgtaaccaacataaccaggggccgcgccgatcaaccgactggtactaaatttctccatgtactcagacatatcaacccggatcatggcatcttcagaaccaaacattgcctcggctaacgccttagccagctccgttttcccaacacctgtcggcccgaggaacatgaaggaaccaattggccgcgtcggatctttcaaaccagaacgagcacgccggatagcacgcgcgacggcggaaactgcttcgtcttggccaacaacccgctcatgcaggatcttctccaagttaaccaaccgatcggattcttttttctgcaactgggtgactggcacaccggtccattgagaaaccacttctgccacatcgtcgcccgtcactttaatgtcagttcgaacgccactttcattaactggttcaggcgtgtcggccaacttcgtttttaaatcagcttcctgagtccggatgttcgcagccgtttcgaaatcttgatggtcaatagcgtcttctttatcagctaccagcttggccagttcatcctgaagcttgtcggccttcgtctcaacattggccttgtccaagcgaaccttcgccgcactttcgtcaactagatcaattgccttgtcaggcaagaaccgagtcgtgatgtaccgtgatgacaaaaccaccgcctgatgcagcgcttcgtcagtaatcgtgacaccgtgatgcgcctcataacgaggacgcaagcccttcaaaatttgttcagcttcttcttcagttggttcgtcgacttgaatcgtcgcaaaccgccgctccaaagcagcatctttttcaatatacttttgatattcatctaaggtcgtggcaccgatcaattgtaattcaccacgagctaatgccggtttcaaaatattggaagcatcaatagcgccttctgcaccgccagcaccgatcaaagtatgcaattcatcaatgaacaaaatgacattgccatctttataaatttcatcaatgatcttcttcagccgatcttcaaactcaccacgatacttggtgccagcgacaagtgagcccatatcaagcatcatcaaacgcttgttgaccatgtcatccggcactttaccagacacaattttttcagcaaagccttctgcaattgcagttttaccaacaccaggttcgccaatcagtacagggttgttctttgtccgccgtgccagaatctggatcagccggcgtacttctttgtcacgcccaacaaccggatccatccgattctcgcgcgccatttgggtcaaatcccgcgccaaaccatctagcgttggcgtaccttgtccatcttgacgagcaccgccacgtgccattggacgacgctttgctgcagtgtccgcaatccccatcttcttgaagaccatttgacgcgtcttcgaaagactgagaccaaggttttgcaaaatccgtgctgccaagatgtcatcttcacgtagcaagccaagcaaaacgtgctcggtaccgatctttaaagcacctaaccgttttgcttcgtcacctgcaaacgccaaaatctctttaccttttggtgagtaaggcaaataactatcactagcttgaccagcggcatcaacagtcccataccctgtgaagcgctcgatctcgtcatggacatcattttcagtgacccctaactgacgcagcgtcttaccagcgataccatctttttccatgaccagtgccatgagcaaatgttctgtcccaacagcatgatgatggaagtacttcgcttgttcctgggctaaaagcaatacatttttagcactaggggtaaataagttgtccataagcacgctcccttttttaaaaactgatgataaactgtttcatctttcataccgcaaacgatccaaaaatgcaaggaacaaacgcgatcgtagatgctcttctgccccttggtcgaagatgcccaacgtctcatgatccatcaccgcgagcatcaggttgccagactggcgggcgatcaacccgttatcaaacaattcctgaatcaaatctcgggcatcccgcatccgcaaacgacttggaatatgctgtcgcatgatctgaatgagatcctgatcatctgtcaatttgaccttcacgattcgaatatagccaccgccaccacgtttgctctctacgatataaccgcgagcaggtgtgaatctggttttgatcacataattgatctgtgaaggtacacaattgaaacgacgagcaatttcagcgcgtctgatttcaacagccgcttcttgcgccaatatcgtttttagataggtttcaatgatgtccgaaatgttctcacgctgcatgtcattcaatcctttttgactttgaccaatcttgactattacacattatactgacatctgtccgtttatacaaatttatgactttgaacgcaaaaaaagaccacgactattcgtgatccaagaatcgggaagacaagattcgaacttgcgacccctacgtcccgaacgtagtgctctaccaagctgagctacttcccgaggaagcggaagacgggattcgaacccgcgacccccaccatggcaaggtgatgttctaccactgaactacttccgcattccgagtatttagttctaatcggcgccagcttagtagcggtcgatgatgcacccagtaggagtcgaacctacaaccttctgattcgtagtcagacactctatccaattgcgctatgggtgcattcaacaaaatgccgaggaccgggatcgaaccggtacggtcatcactgaccgcaggattttaagtcctgtgcgtctgccaattccgccaccccggcataaagtgaaaagcggaagacgggattcgaacccgcgacccccaccatggcaaggtgatgttctaccactgaactacttccgcataccgcatattcaattattgagaccggggagaaaaaaccacctattggaaccgagcttttacttcacagtacaatgcgggtgaagggactcgaacccccacggtcaaaaaccactagaacctaaatctagcgcgtctgccagttccgccacacccgcaaaaggtgggttaaaaatgagccgtgacaggctcgaactgtcgacccactgattaaaagtcagttgctctaccaactgagctaacggctcaatggaggatacagggctcgaacctgtgaccctctgcttgtaaggcagacgctctcccaactgagctaatcctccatatgtaagcgtggcagcttcctaccctcgcaggcagtttcccaccaactactctcggcgtgaagaagcttaacttctgtgttcggcatgggaacaggtgtatccttcttgctatcgccaccacacttatgagaactttgcgctctcaaaactggctatcattgtttaattgctgccttgaacctaacgtacttgtcatcgaaacgtgttcgcagtcgcagaaacctgcgcctgcttgcacgcttacttggttaagtcctcgaccgattagtactggtccgctccatgcatcgctgcacttccacttccagcctatctacctgatcatctctcaggggtcttacttccatataggaatgggaaatctcatctcgaggggggcttcacacttagatgctttcagcgtttatccctgccgttcatagctacccagcgatgcgcctggcggcacaactggtacaccagcggaacgtccatcccggtcctctcgtactaaggacagctcctctcaaatttcctgcgcccgcgacggatagggaccgaactgtctcacgacgttctgaacccagctcgcgtaccgctttaatgggcgaacagcccaacccttgggaccgactacagccccaggatgcgatgagccgacatcgaggtgccaaacctccccgtcgatgtggactcttgggggagataagcctgttatccccagggtagcttttatccgttgagcgatggcccttccatacggaaccaccggatcactaagcccgactttcgtccctgctcgacttgtcagtctcgcagtcaagctcccttatacctttacactctgcgaatgatttccaaccattctgagggaacctttgggcgcctccgttacattttaggaggcgaccgccccagtcaaactgcctacctgacactgtctcccgccacgattagtggcgcgggttagagtgttcatacagctagggtagtatcccaccaacgcctccatcgaaactagcgttccgatctctacggctcctacctatcctgtacaagcggtacaaacactcaatatcaagctacagtaaagctccatggggtctttccgtcctgtcgcgggtaacccgcatcttcacgggtactataatttcaccgagtctctcgttgagacagtgcccaaatcattacgcctttcgtgcgggtcggaacttacccgacaaggaatttcgctaccttaggaccgttatagttacggccgccgtttactggggcttcaattctgggcttcgcttgcgctaactcatcctcttaaccttccagcaccgggcaggcgtcagcccctatacatcatcttacgatttagcagagacctgtgtttttgataaacagttgtttgggcctattcactgcggctgaccttgcggtcagcaccccttcttccgaagttacggggtcattttgccgagttccttaacgagagttcgctcgctcacctgaggatactctcctcgactacctgtgtcggtttgcggtacgggtagtttatttctcactagaagcttttcttggcagtgtgacatcaggaacttcgctactataatttcgctccccatcacagcttgtccttaagactgcaagcatttcactcgctgtcagacttgctgcttgggcgcacatttccagccgtgcgctttccttagcctcctgcgtccctccatcgcttaaacaaaataaactagtgcaggaatctcaacctgcttgtcatcgactacgcctctcggcctcgccttagatcccgactaaccctgggaggacgagccttccccaggaaaccttagtcatacggtggatcagattctcactgatctttcgctactcatgccggcattctcacttctaagcgctccagccgtcctcacgatcgaccttcaacgcccttagaacgctctcctaccgcgcacccttacgggtgcacccacagtttcggtattatgcttagccccggtatattttcggcgcagtgccactcgactagtgagctattacgcactctttaaatggtggctgcttctgagccaacatcctagttgtctgtgcaacgccacatccttttccacttagcataaatttagggaccttaactggtgatctgggctgttcccctttcgacaatggaccttatcgctcactgtctgactcccggagtaagatcgatggtattcggagtttatctgaattcagtaacccttgatgggcccctagttcaaacagtgctctacctccatgatccatcctccgaggctaaccctaaagctatttcggagagaaccagctatctccaagttcgtttggaatttcaccgctacccacaactcatcccagcatttttcaacatacatgggttcggtcctccagtgtgtttcaccacaccttcaacctggtcatgggtaggtcacttggtttcgggtctacatctgcttactcattcgccctgttcagactcgctttcgctacggctccgacttttcatcttaacctcgcaagcaaacgtaactcgccggttcattctacaaaaggcacgccattacccattaacgggctttgactaattgtaggcacacggtttcaggaactgtttcactccccttccggggtgcttttcacctttccctcacggtactggttcactatcggtcactagggagtatttagccttgggagatggtcctcccggattccgacggaatttcacgtgttccgccgtactcaggatcctggacggagggttcgacgtttcgcttacagggctttcaccttctgtggcgcagctttccagctgacttcgactacgtcggactttggtaactccaatgtccagtcctacaaccccgagaagcaagcttctcggtttgggctcttcccacttcgctcgccgctactatgggaatcgagttttctttctcttcctgcgggtactgagatgtttcagttccccgcgtctgccgccggccagctatgtattcactgacaagcaatacactgatgtgtactgggttcccccattcggaaatctccggatcaaagcttacttatagctccccgaagcatatcggtattagttccgtccttcatcggctcctagtgccaaggcatccaccgtgcgccctttgtaacttaacctgtactgacttgcgtcagcggttatgcgatgcgaatttctttttcagaaactcatacaaatacgctgtgttctcggcaatttaaaacaattaatacaatgatatccagttttcaaagaacaaagtagccgactttcatcggtcattggcctttcggccaatggaggataacgggatcgaaccgatgacctcctgcttgcaaagcaggcgctctcccagctgagctaatcccccataagggttgttcaattaacaagcgtacgcttgatgggcctagatggacttgaaccatcgacctcacgcttatcaagcgtgcgctctaaccaactgagctataggcccgataggcgtgaagaggttatcctctcaaaactaaacaaagtttcgtgtgtgcaggtttccgtcagactttcagtctgtttccttagaaaggaggtgatccagccgcaggttctcctacggctaccttgttacgacttcaccctaatcatttgtcccaccttagacggctcgctccctaaaagggttacgccaccggcttcgggtgttacaaactctcatggtgtgacgggcggtgtgtacaaggcccgggaacgtattcaccgcggcgtgctgatccgcgattactagcgattccgacttcgtgtaggcgagttgcagcctacagtccgaactgagaatggctttaagagattagcttgacctcgcggtctcgcaactcgttgtaccatccattgtagcacgtgtgtagcccaggtcataaggggcatgatgatttgacgtcatccccaccttcctccggtttgtcaccggcagtcttactagagtgcccaactaaatgctggcaactagtcataagggttgcgctcgttgcgggacttaacccaacatctcacgacacgagctgacgacaaccatgcaccacctgtcattttgcccccgaaggggaaacctgatctctcaggtgatcaaaagatgtcaagacctggtaaggttcttcgcgttgcttcgaattaaaccacatgctccaccgcttgtgcgggcccccgtcaattcctttgagtttcaaccttgcggtcgtactccccaggcggaatgcttaatgcgttagctgcggcactgaagggcggaaaccctccaacacctagcattcatcgtttacggcatggactaccagggtatctaatcctgttcgctacccatgctttcgagcctcagcgtcagttacagaccagacagccgccttcgccactggtgttcttccatatatctacgcatttcaccgctacacatggagttccactgtcctcttctgcactcaagtttcccagtttccgatgcgcttcctcggttaagccgagggctttcacatcagacttaaaaaaccgcctgcgctcgctttacgcccaataaatccggataacgcttgccacctacgtattaccgcggctgctggcacgtagttagccgtggctttctggttggataccgtcacgccgacaacagttactctgccgaccattcttctccaacaacagagttttacgacccgaaagccttcttcactcacgcggcgttgctccatcagacttgcgtccattgtggaagattccctactgctgcctcccgtaggagtttgggccgtgtctcagtcccaatgtggccgatcaacctctcagttcggctacgtatcatcgccttggtgagccattacctcaccaactagctaatacgccgcgggtccatccaaaagcgatagcttacgccatctttcagccaagaaccatgcggttcttggatctatgcggtattagcatctgtttccaaatgttatcccccacttaagggcaggttacccacgtgttactcacccgtccgccactcgttccatgttgaatctcggtgcaagcaccgatcatcaacgagaactcgttcgacttgcatgtattaggcacgccgccagcgttcatcctgagccaggatcaaactctcatataaatatgagctgttcgaatagctcgatttgttgttctagcgaattgacttcgcaaatgttacttcttgcctcggtaccgaagcaccaaggaccctgcacatttaaacgaaactttgttcagttttcaaaggacgacctcgtcaaaagacaactttgatatattatcacaagcaatcaatgcttgtcaataactttttttcatacctgatcggtaatcgttgttgctcatttacgacgctttttatcataccaacggtttgcgccatcgtcaacaactttttcaattaaaaatcactctccgaatgctagcgaataatagcacaatattatccgtgatttgcgccacttatatcctggtgaacgtcatatctttcggaaaataaaaaatgccgccacaagggcgacatatcatgattggttatggccgcaatgttgggaacaaaaggacatcgcgaatggatggtgcatcagtcagcaacatgactaagcgatcaatcccgattccgagaccaccagttggcggcatgccgtattccaaagcttcaacgtaatcgtcatcaataccttgtgcttcgtcattaccagcactcttttcagctgcctgtgcttcaaaacgctggcgttgatcaattggatcgtttaattctgtaaaggcattggcgtattcaccgccaccaacaaatagttcaaaacgttcaacaaaccgcgggtcttttggattcttctttgccagtggtgaaacctcgattggatggcccgtgatgaaggtcggctgaatgagcgtctcttcgacaaactgatcgaaaaaggcactgataatatggcccaccttccaataagtttcatagtgaacatcatgttcatcggcaagtttacgcgcatcatcgacactcatttcaggccagaagtccacgccagtcttgtctttaatggcgtccaacatattaatccgggcaaacggtgcgtccagatcaatcgccatcccctgataggtgagcttcccggtatctagcaccttatgcgcagcaaaccggaaaatcccttcagtttcggtcataacatctgtcaaatcccagtaggcggcataagtttcaagttcagtgaactcgggattatgcttggtatcaatcccctcattccgaaaaactcggccaatttcataaacacgttccatgccgccaacaattagacgctttaagtgcagttcaagagcaatccgcagatataaatcaatatcaagtgcattgtgatgagtcacgaatggacgagcattcgccccgccagcctgattgtgtaagactggtgtctcgacttccaagaaaccattgttgtccaagtattcacggacagcactgacaatcttggttcgcttaacaaaacgatcaaagctgtcctcattagaaataagatcaaggtaacgcttccgatacttttgttcgacatcggtcagaccatgccacttatcaggtaatgggcggagtgccttagcaagatgggtcacatggttggctttaaccgtcagctcgccagaatcagttttcatgacttcaccgctgataccaagaatatcgccaagatcggcctttttgaagatcatgtagttgtcatcgccaacgacatctttacgtacatagatctgcatcttcccgctacgatcacgaatatccgcaaatccaaccttgcctttgccacgtttagacatcatccggccggcaattgtcacttctggtttttcatccaacagtgtctctttatcatcttcaccgaattcttcgcgtactttcgctgcggtatgggtccggtcaaatcggtgcccgaatggatcaatgcccgcttcacgcaaggcttccatcttttctcgccgcgcaatcatttggtcattcatttctggttgctgtccgttatccttagccaacacatgttcctccgtttcaatttttaccactctttgatgatgacaattttacatccaaaaagcaacctactctaacaaaaagacactcgtcactgaccaacaaaagtggacaggcgtgtgtcaatgaaacactgctaatttatgctttagcttgccgttcgcgagcgcgctcttcggtttgttcaacaaaatcatcaaagatgtgatcaacctctgcctgcgtatcaaccatattcaccgcgactttggttttagccgagcgcggaattcccttcaagtagtaagctgcctgcatccgaaattcccgaacggcctgatgttcgccatgaaggtcaaccagccgttgtaattgcagctttgctgtcgcaattttctcgcgcggtgttggttccgggatcaattcgccgtcttccagataagccgacatctgtttcaatacccacggattacctaatgccgcacggccaaccataacagcatcagcaccaacctcgtctaacatccgcttagcatcttgcggggtacgaacgtcaccgttgcccatgaacggaatcgtgaggtgctgtttcacttctttcaaaatgttccagtccgcatgaccagcataaagctgtttacgggtacgaccatgcatggcaagcgccgcggcaccgccccgttctgcagctagggcgttctgaacagcatagacatggttctcgtcccagccagtccgcattttgactgtcactggtttagagacggcatctgtcacagctgcaaccatttcataaactttttcaggatccagcagccagtgcgccccggcatctgtcttcgtcactttagggaccgggcatcccatgttgatgtcaatgatgtcggctgccgtgttttggtccacaaacttagccgcattcactaaagtctctttggtaccgccaaaaatctgaatagaaatcggatgttcacgcggatctacaaataacatattcagggttttttcgtttttatacatgatcccacggtcgctgatcatttcacagaccactaacccggcaccgaattctttagccgttacccgaaaagccgcgttagtcacacccgccattggtgcgacaactaagcgatttggaatttcaacatcggcaatatgccacatacaggccacctctttcttgcttgcgccttgctaactttacttaaaataagtgtcaactgcaactattcgtgtcgggtcatcaaggcttccaagtccgccacactataatgatattgattgccacagaacttgcacgtggtttctgcaccaccgtcctgatcaatcatttcctgtaattgagcatgcggtaaagttgccataatatcgccaaaatgttcttttgaacaattgcaggcaaattttaacggctgcgcatcaagaaattggactggttcgtcaccggcaattcgctgaataatttgctctggtgtcaggccgctttttaataattcagaaaccaacggtaatgttttgacgttggcttcaagttcagagagctccgcatcgttggcaccaggcaaggcttgcaacatgaaaccgccggccacctgaatcgtgttgtcggcattgacgaagactgacaggccaactgcagccggaatttgctctgacttggctaaataataggtaaaatcttctgccaactcaccagaaaccaaaggaacttgcccagtgaaaggatcgccgacgccaatgtctttcgtcactgctagtaagccacgtttgccaacagcccgcgcaacgtcgattttaccaaccagattcagcggcaagttaacgtgcggttcttcaacatagccgcgtactgtgccaacattggtaccatccgtgacgagtgcgccaacgggaccatcgcctttaatgcgaaccgtcagcatatcgtctgcgtttttcagcccggaagccgctaacaatgctgtggcaactagcgtccgaccaagtgcagccgatgaagcgctccaagtatcatggcgccgctgcgcttcacgcactgtttgagtcgcatcagcagcgaaaattcgaaaatgttcatcacgcgacaatgcgctcgcgatatagtcactcatgtagggtcctcttttctgaaaggtaaacgtggctattttaccagagatgggtgttattgaaaagatgcggctatcgtagtcgcctgaacaagcgtggataaacaacttttatatttgtcgcaaagctctgtccatttctttccataaaaaataccccgcctttctatcagcgaggtattgattgttactaatcaaagctttggtcacgttcggcctatgtaccggccaagtgaaaagcttaagatgtcatttgaatttagttcaggcctgttgccaaagtccaagttaacgtggtttcgtacgtaccgttattaacgactgatgtcttaggcagaaccagtttgatattggtcttgtcccagccaaagacgttagcgccttcaccttcacctgtagccgcatgtgcaacctgatgattggtgtcagtgccactcaaggtcatcgttgttgttttgctgatgtcagtcaatggtaccaatgcaccaaccggcgtgaagccatcatcttgcgattcgttggttaaaccgtagacattaccggtctgaccataagccgtgttcagcatggtcaatgtcgcattgtcaatggtcttgccagtatcggcaccattatcgtccttcaatgaaagtgggccatctgccttgacgctcagtgtccaatccccggctttactgtcagtttggccagttttatcttcagcgttctcagcatcagtacgtgtcgtttgcttatcaacaaccgttgtccaagccttgcccttaacattagccaaagctgtgtcatcagtattaaggacagcggtcaagtttgtattaccactcttataacttggatagcgagtattgtcagcccgccctgcgttttgtccgtcagcagtgaaaaccgggtaatctgagaagaactgttcgtggttaccaaagtccaaaatcttaggaaccatttgcagtcgcagataaccggtgttaccggttggcggcagttgaccaaaggaaatccccgcggttgtcttggcgtcttgcggtagtgcctgaccaccgttaacgcctgcattaccttgaacagtagctgcttgcgttgccgctggggcagcgattgccaaaccggcaagtaaggttgcacccgcgaccaacgcacttgtcattttagtgaatttcattttgaaattcctcctcttaaaattttttacatcatggatttatccacggtataaaacagtttcaataagcgatcactcgacgatcagaaaagattgaccgtcttccaggtattaaaatcgttgtatgtcttgatcgtaaagacaagacacgtcacaaaggcgatgagcagcaggatggacagaccaatccaaaaccacttgacgcgtcggtaggaaaatttagcgatcagtgctttcaacagcatcacctcctttgctgcggcgaacgtgccgataaataaagaaactaatcagtagtaaaacaaccaacacaattacaagcttgacccaaagccattttcgttgggcaatttggtaagcagttgccgaacttgtaaccagttcccctgaaccagtgattttgacgtaccgtgtgtcttctcgtacctgtttgccttgtttcagccgactcgtcagtttatattcacctgccactgatttttgtccggttatcagtcgtgttacatcaaagactgtttgtggcgcgattcgtggcaactcccgggtgacagttaatgagaaaaagcgactcgttgcgcttgtcagattaatcttggctgaaacatcctttaaaaaaattcgcttaggattttgtacttgagatcgcaactgaaatcctgatcgtttttgtaccaaagatgtctgccccatccttaagttgctaacgctgccagcaacatgaccgttgtgcaagacgaggccaagcgtataagcaattcggttttggacacttgtatctgttgttgatggtgctaaggctgacaagcgaattgctgacaaataagttcctcgtggctgccctttccccggcttcaaaacaattggcagttgtcgcgtttctcccggcttgagctcaaattgacgatcaatcttcactaagtcactcccggcgatcggtagatatttacgattcgcctgagtggcttttacataactaacaacgccattagctcctgtttgcgcatcaagaatttcggcattcacttttaagatttgtgcgctagcgttgtatgcctgtactgtaatggttcgtcgctcacttttaggaagatcgagatcgaagtagccagcgcctttaccaacatgattgtcactaggtaaaactggcgcgaccatcagtgcttgctggctgttagagacggtagcgcttacaagatttgtaaaagtaaacatgttcatcaaagcaagaccaagaacaccgatgaggactaatcgcaaggcttgccagtcgttcttcatcgtggacgaagcttgaaagtccatagcagtccccccagactggctaatagcaagacgcctgtcccgatcgttgcataaagccagtgattgactggtttcttgatagcacgttcgttgatactcttagcctgaacgttactaaccttcatcgtcttcttaaacgtccagctcattggaaaacgattttgcgtgttcaagcctttgagtgtgaccttaatgtgataggtgccgggcttcattgattcataactccatgagaccggaaagaccattttcgagttaggggcaatcatgaaattatcagctttgtacgttttaacatcgccgctatccatccccactgcaacactgacatttgcttttgagattgccatcggttcaacattacgcaacgttacgccaagtgcgggatgtttttgaaataagattgggtttgtttcgtcatacttgacgttcggaaaaacttcataattctgcccacgtaaaaccaccccaactgagtaagcatagttcgagccaaccgcgttgccgccagattcgcctttatcgacatgttcgataaaatgccaatcaccataaatcatgccatcatatcgctgttttggcattttgatggttgcactgatgaccttcatctgtttcggtgctaattgaatcgtggcgccacctttgtctaaggttgcaacggttgtaaatggtgttttcagacttcggtcaagattcttcgtgctcggtgtaaagtcgataccgccgccatcttgggtataggcgtttcgtaagtcgctcttgactgtgatgttcttatcagaaatattttgaactcgcatctggatggtgtgcgttgtatcttttgaatacaccaaatcaaaataattcagtttcatatttgcttgcgcatcaggcaaaaccggctgcacttcaaagtcagttgtttcggttttactggcggcgaccacgctttgcggtgcgagaccgaccagtatgcatgccgcggcagcaatcagccaccgccctcgtttccattgcaaaagtcattcctcctatggtaaaagcgacaaattccaagtgagcgtcgtatgatagcgggtctgataccgtggtgtgcttgctggcacatgtaacccaacacttgtcgcgccgctatcgttgtcaccaaagttaatccgccatgtgccatatccgctattgtcatacaacgtcccggtcggatctttatcagtgctggcatcattgcgatagtgaccgctctttttaacttgtgctaaaacagttggactggtggctgtcggattcaaggaaaaatcatcaggtgcttgataatccatcgtgtcttcctgcgcccaagttggatttgaagttgcatctgttcgtttcagtttaggattcatcagatgcagcgtcgcatcggtcaaagtttgagcaacctgtaagttgggatcttgactgtttggtttcggagtcgacttaaattgaccgtcctgttgcacactgagttgccaaccttttgtgccatagtaatcttcaactgtgacgccaaaaggcaacggttgcttagtcgtgctttggttttcaccaatgtaataggttcggtcaaccgacttattgtcaaactgaccaaaatcaagcgttggatcaacggtcagtttcaacatttgtttctcatagcgataagtcaccaccaaatcgtctttactgatcactggatcgaccacgctggcttgatcaaaagtcgcattcgtgaggtcactggaggttgcctgatcaaccactgtataaccatcaattgcttttggccgaatcggatctgcgttaatttccgatacatgtttgccgacatcaccactcactgtcacttcgggcgcgatctcggttggttttgccatgtcacttgcccgatcaacatagcggaaaatcactttgcctgtcgtcgccggtaaatgtatggtcgtctgattcgagaataaggtccccacactggctttgttgagaatcgtttctgcggtatcctttcgatcaattttggctttaaaacgaactctgaaaccttgaccattcgggatcgtataaggaaaggcaatggtgccattcgtcttgaaactcgtgtcgtcaattgttacaaactcgttgttcgtgtcagcatctgcaatctgtaaagaaccatctgtataagtggtgttcgggtcaagctgatccttgatactgcccgtgcccatacctgtcaagttggtatattgcaattgatacgtgacaccatcgccattttgaccgttcgtctccgtcttaaactcagtctcgccggctgtgtcattgcgaaccgccttttgaagaacgaaatcttccggcggctgacgcaattgatactggtaggtcacggtgtaggacgttgtcgcagaaaattggcctgaatctttgccatcaggcgtatcagctgtgtacttgctagcgtattgataccaattattttgatattgaatccattctggtcgtctagacgatgcgtcccaactgttacccggatcaccggggatcgtgactggatcagcaatttgttggccagcagagtcgttaaacttaacagtgactggttttgcattttgaggtgtcttaatgagtgcaaccgcctgaaaagtaggattagcgccgctagcaccggtgtatccataatagactttgtctgatttaaagtagtctagaacatttttaatgtgaaaagtgcttccttgcgtcgggtcatcgtcaaggtaatattgcaagtcgccgcctaagatgcgtaccccattttgatacgtcacagacggtgtccacttaacaacaaagtgacgaaacttgccctccgaaagcggtttatttaactgaatatattgaagatgtccaacatcttctgattttttggtggttagcggtgtctcacccggacgaacaacgccaagatggccgaccccaaacgtatttggatagttcacatcaaatcgatcatctgcgacgccagatccgttccaccagttgtccatttcaactgcaagtgcgttgcggatatattgcttgatcatgttgtttttgccatcagtcgaccacggataggcgccaagtccgccacctggggagccataagcacctatcgtcaacggatcgttttgcagaacaaaggccatcccatcagcatctactccaggatgcgagccaaagtaatgataagtgtcatatgtaaatgcactattcaggtcaatctttgacttagaccacataccgccaatctgccaactcttcgtctcgcgactacctgtgacaataagtgcctgcggataagccttgctaaaagcggagacgttagggaagttttttgggtccgcttgactcttagtaaagtaatcactggcattcaacgttgaggccggtggtgctaccggaaacccatctgcggcaccatatgttttctgaatagggaaaaggcttagcgacaaaactgaaataataagtatcatcaacaactttgaaaagcttttcacctgagtacccctccctaattagtcctctaaattatttaatgtccgatttaataacgtcctttattttatgttaacaatagaggtctcaaaaaacaacaaatatttttatatatataatatctaacgatacgaatatagcgctttagcacttcatagttaaggtgtcaagtctcaaaaaccaaatgattatttattaaaatatgataatctttctcttcaaaggctaacagttcgttatgtaatgcttttcataaaaggcattaaaacctcattactaacgaaaatagatcgatcggtcatttttttagcgcaatctgacacaacttttaactatacttaacgagattttgcctgctactatgccatatttgaatttggccatgacatgagaagacgaaaaaagtccttctcagcatctctgctaagaaggactttttcaaatcattcaaatctaagcttgcggaccctgctgatcatcgttgtttgaagatgaattgtcagtcgaagtatcgtctggcttttcaacctcatcagaatcagtatcgtcgtcactggcttgctgatcaccagattgtggtgaatcagttttaccactggcttcttcatctgcttgcttttctttatctttgtgttcaagggctgctttggattgctcgaaagtagcggccttttcacttggaaattcatcttggtcacgagcaggcattttgccatcgttgaacaagctgaggatttccttttcattcaaggtttcgtatttaagcagtgcttccgcaatcaacttatgctgttcacggtgggcctcaatgatttcgtgagcctgtttatgggcatcgtcgataatgcgacgaatttcatcatcaatggctgtagccgtcgtttcagaataaggaggtgtctgaccatattgtgcacccaggaacggttggccttcagtttcaagctgaaccgtgccgagacgatcggacatcccatactgcgtcaccatactgcgggcaatttgagttgcctgttcaaagtcattggatgccccagtagactcaacgccaaagataatttcctcagctgttcgtccacctaagagtccaacgatttgttctgtcaattccttcttggtaagtaggaattgatcatcctttggcagcatgatcgcataaccgcccgcgcgtccacgaggaatgatcgtgacttttcgaactgtccgcgaatcgctcaggaccaaaccaacaatggcatgtccggcttcgtggaacgccaccatattccgttctttcggattaatgacgcggtcgcgcttcgctgggccagcaatgacccgatcttcggcttcgtccacgtctgaggcatcaattgccttcttacttcgtcgggccgcgactaaggcagcttcattcagtaagttttccaaatcagccccgacaaaaccaggcgtctgacgagcgacttccttaagatcaacacttggtgcaagcggcttgttcttcgcatgcactttcaagatggcttcacgacccttaacatccgggcggccaaccagaatcttccggtcaaaacgacctggacgcagcaaagcaggatcaagcacatcagaacggttagtagcggcaatgacgataaccccttcgttaccggtaaacccgtccatttcaaccagtaactggttcaaagtctgctcacgttcatcgtggccgccgcccataccggcaccacgctggcggccgacagcatcaatttcatcaatgaagatgatggaaggagcagcctttttagcctgatcaaacagatcacgcacacgagaagccccgacaccaacgaacatttcaacgaaatctgaacctgaaattgagaagaacggcacaccagcttcaccagcaaccgccttggcaagcaaggttttaccagtaccaggagggccttccaaaaggactccggctggaattcgagcacctaatgccgagaatttccgcggatccttcaggaattcgaccacttcaaccagttcctgtttctcttcttcagcaccagccacatcggagaagcgtactttgttggcatttttatccgcctgcttcgcccgtgatttgccaaagctcatcactcgaccggaaccaccgccttggccagcctgattcatcatcatgtagaagaagaccatcatgatcacaatcggcacaaccgtaatcagcaagctaaaccagacgccggattgtgattcttcctgcgtgtcggttttaacattgttagcgctggttgccttttggatctggctcaaagtcgcatcgttcgtcggaatatatgtcgagaacttcgtgactttggtgctctgactaccaaacagactcagcgagttatttgaactagaagacttctgtgccttcttgtattccccactgaccttatagactccgccagatggctggagtgaataactcttgacgttgtcttttttcaactccgacaagaacgtgctggtttcaatctcttgggacgatgttgtcccattatcgcgcatataatacgcaaaaccggtgaccaatagcacaaaaataatgatatacgttaatgtgctactgaacaggccgttttgttttttcttcatttagaacctccggcaacattcgattagtaccttatatactaccacaaacacaacattcagatcaggattttgctgcgtagatttccggttttaatacaccgatataaggcaggtttcgataacgttcagcataatctaagccataaccgaccacaaattcgttaggaacagttgtcccaacgtaatcggcgtgcacatcaacgacgcgaccttctggcttatccatcaacgcacaaatacgaaccgacttcgcatgacgcgttttgaaaatgtcggtcagatattttaaagtccggccagtatcaacaatatcttctacgattaagatgtcccgatccttcacgctggcgtcaaggtccttgataatcttgacttcaccgctagactcggtcgcatccccgtagctggaaacgtccataaagtcgagttccatgtaatcatcgatctcacgaacaagatctgtcataaacatgatggcaccttttaaaatgcacaccactaaggggtttttccctgcataatcgtgcttgagctcagcgccaagtcgtgccgtgatggcatggatgtcgtcttgagaatacaacaccttcaaaatatcggaactcatgatttatcctcacttttgtcaacatctggtgattgcaccagtacaacatggagtatatcagtttgatctatggccgacaatcgttctaaaggctgaccttcaacccaaaacacttgatgaccccgagctaaaaccaataattgatcgcgctgataggctggaatttttgtgttaatcaaaaaacgccgcagtttctgaatcacgccattgggtaattgcacaacatcgccagcttgccttgtgcgcaaagtaattggcagtttcactctgaccggcgtgcctttgtcagtagcaacgcttgtctgcaggctgaaaatgccacgagtggtacgatgttgctgatcaagcttagtgaatgtgaccggtttaactggcgcctgccgcgttacgcgaacaatttgttcactctggacagcaattgaaatcccgccgcccagatcaaaccgccgctcttttgtcccgcttagactcgctagaactggcgaaagtagctggcgatcaacgttgggttgccattgctgcagtattttttttaatagcagacgctgaacagcttccggctgcgatgatgcggcacgccaattaaccgttgcgtcatcaacctgcaggcgttgaagccactcagccagttgtgcttcagccaacgctaataggccagtctgctccatcgtgaatgtttgaatatgcgccagcaattgcgtgttttgttttttgaatgcaggaatgacctgatgacgcaactgatttcttgcgtaatgcggatcagcattgctggaatcttcgcaaaacctaacgttgtgctgatcagcataggagcgaatcatcgccttgctgtagggcaataatggccgcactaaccgacgtccatgccaagctcgatcagcgcgaataccgattaacgcggccggatcgccagagcgcgccagccgaaacaaaattgtttcaagttgatcatccgcatgatgagctgtcatgacaacctcagcatgctgctcagcggcagtcgcggctaagaaggcatagcgtgcttgccgagcggccgcttcactggttggctgcccatcagatcgtcgccattgtccagtcaccactggcacctgcaattgttgggcagcggcgacaacaaaggcttgttcctgctgactctctggtcgcaggcgatgatcgaaggttgccaccaccacatctaagtcagctgctttgacagccaggttcaacaacaccatcgaatccacgccgccagaaaccgccacgagcacacgagtatgcggtgcaaagccaaatcgttgaaaaagtttcgggctcatgggcatcctccacgcaatcctgcagaaaccaagaaaatgggcctagaacaaaatgtgctttgttccagacccgatttttaactgcggcgaccaccacggccgccgcgtttaccctcggtattgcggcgaagaacgcttaatcgatcttcgctttccttcaaatatcctgacatcatcgcatcaaaatcatctttggatggttgtgctttgtgtccaaaatgattgccgccgccactacgcgcaccgccttgatagcgattgccgcttggccgagcagatggtgtatgatgactctcccgatgactattttcgtgttcactttgctgcggtttatcgaccgctttccggatagacaggccaatcttaccatcttggatcgaaagtactttcaccgtcaccggttcgccaacatgcagcacatcatgaatatctttgacataagcatcagagacctcgctgatatgtaccaatccggtcttgccatcgcctaattcgacaaaagcaccgaattttgtgatcccggtgaccttaccagtcactttcgtaccaacttcaactgccataaaaaaagaagtcctcctagttaaatgtacctattagtatagcacggcagaaaaccgacgcaagagcgcgagccagcccggttagaaaccggagtgtacgtggttttggccattgcaaccaaagtccttacacgcaggtttctgggtctgtgagcgcgttttagatgcaacagcgtccagagcctagcctttctatttagctgtccaaatcactgattcacattcaaatccggaaccttgttgaccttatcaggcaagttaaaaataatctctccttgcttcgaatagagatatttttcgcgaatcagcttaaccgtgtagtcatcattgtgcagttggtcgacctgaaccttgagggctgacttgttggcttttaattttgtcagactgcccttcgctttttggacggcgtggtttgtctctcctaacgccatttgcgttcgaactaaactaagcccgccgaaccccaaaatggcgacaatcacgatcaacagattccgaatccgcttcatatgtacggcgtgcgcccgtggattgggcgtacgcttgtgcttttgttcgtgctcgcgcgtatacgcattattcaattgactgatattgttctttgccatttgaccgcaccttcgtttttcaccagccatttacttacatccgtaaatcaataaatcaagtataacaaatcccgagggctgcgagccaataaatacgtattaaaatgtttctttataatcctctttcaaaaccgtgtacatccccgctgcgtcatttttcttggtggtttcaaccaaatcatccgctcggacagtaagcgtcttgttgccaaagttaatcactaacgtatcccccacacgaacatcagagcttgacttagctggtttatcattgatcataattcgccctttatcggcaatttctttggcaactgtgcgccgcttaataattcgagagacttttaaaaacttatctaatcgcataacttaattacctcgctttatccgttgtaagaacttcatatatagtttaccgcctggcaaatcgagcatttctcgcagcgttagcattttaagccaagtccctgcggctaagaaaatgatgaccccaagtaataccccaacgactgtcacacccgctgccaccatccgggagcttaacggaatccaaccgacagcggcgtatactgccgcggccatgataccggtcacgatgattaacttagggacgaacagacggatggcactagcacctttgatcgtctcaggaactgcataataaatcaagcaaaggatcaagcccagtgagagaatcgttgcaccacttgccccggcagtaccgaacttcacgacaagcggctggttgatgacggctttaagcaatatgcctagcaacagcgcgacgctaatgccggcatactgatcaagactttgcaaaatagcattataggcattgatcatggcgacaacgacaatagcaaccgcatatagttgcagcgcaaatgtcccggctgtgtctccaaacagcagcaaatcaatagccggcatcaaaacaatcaagccagctgtcgccgccaatgcgaatgctaaattaaaatgcaccaattcggcaccgctgcgaataaactgacggcgctggcgggcttggcgcgcctgagtcagactcggtaaaagcgttgtcgacaaggatgccgctactacaaggcccaattgcactaaaggctgtgcccggtcataaacccctttaagacttttcgcagtcaccatggcgatacctgaagctgtgagcccttttgtaaccgtaaagctatcaatcagctgcaacaaaatcaacaaagctgcgtaaagtgtgatcgccccgccttcacggacaaaccggctaatgagacgtacatatgcctgcatccccggaaaacgaaagtgctgctgaccaaacacttgccgatatggccgccataacgtcaatgcagccgccgcgccgccgaagaatgcaccggtcattgccacagcacccatctgataaacgctccaatgatattgcaaaaaccaccaagctgctagcagaatcacagcaacacgcacgacttgctcaacaacctgactagtggctgttttagccatatcaaaagtgccttgaaaataaccgcggcctgtggccagcaatggcatcgtcaagaacatgaaagccacagtttgaatcaacggcagcaattccggatctgccatggcttgcgcgatcacgccaccaaagatttgcaggcctaaaaacaatgcccacgagatccatgttaaaatcacgcggctttggtgcgcgactgttagcttggcctcatcgctatccgcttcagcaactagtttagaaatataaaccgggaacccggacaaagcgaatgtcatgcctaatccgtaaaccgggtaaatctgttgataggcatagaagccggtgtcacctaccatgttttggaacggtacccgataaacggcactgagtattttggcgattagtgagctcaggctcaaaatccacgcgccgcgcatcaagtgcttcatttcttggttgtgcatgggagccctcctatcactatatccactgacaccgaagtctgcttgagctgattgatcattggcatgtcatcacagccaagttgggtcaaaaacaatgaatgcccctacttttcacagcaactatgccgatttcttttccggttgcggattgacaacagtcagtaatccctgcaaaaagccggtcaattgatcaagccaagtcgcagtcttcatatcttttggcaatgctaacgtaactgtcagcttgccatccgtgatcgcgacctgcgctttcaatgttgtcgcacttaacgctttgaaaatcggctcgccttgtgctttagcagttgcttgcgatgacaacacaaccgtcaatttttgccccgccttcgttacgtgattgacccaagccaagtcagcaaaccgcttgagatgcgcaatcgccaataaattggtcaccggttgcggatagtcaccaaaacgatcaatcagatcttcgctgatctcagtttcggcttcatcgctatctgcttctcgaatgcgtttatacaactcgatcttctgacgggaatcggccacataatcagttggcaggtatgcttccagccccagatcaatttcagcatccgttttctcagccgatttaataccgcgccgtttattaacagcttcttgcagcatctgggtgtaaagatcatagcccactgaatcgatgaagccatgttgctgcttgccaagtaggttgccagctccgcgaatcgatagatcacgcatcgcaattttgaaaccactacccaattccgtgaaatctttaatcgcctgaagccgcttttcagcaacttcattgagcaccttcatcggctgatacataaagtacgcataagcgactcgacttgatcgcccaattcggccgcgcaattgataaagttgtgacagaccgtaatgatcggcattctcgatgattaaagtattggcattgggcatgtccacgccagtttcaataatggttgtggtcacgagcacatcgtaagcaccgtgcaaaaagtcataaatgacgttctccaactgcgtctcagtcatctgaccatgcgcatatccgacacttgcatctggcaccagttcctccagttgactcacggtacgttccatatcttccacccggttatgcaggtaaaagacttgaccgccgcgttccatttcccgttcaatggcttcgcgaatcacgcctggattttgctccatgacaaaggtttgaatcggatagcgattcgttggcggcgtttcaatgacactcaaatcacgcacacctagcatggacatgttcaacgttcttggaatcggagtcgccgtcagcgtgagcacatcgacattactcttgagttgtttgatccgttccttatgcttaacgccaaagcgctgttcctcatcaatgaccagcaatcccaaatcccgaaaagcgacatctttagacaacagccgatgggtgccaacgacaatatcaatggtgccgttcttaagccccttaatcgtttccttgttctgatgcgctgtctggaatcgtgacaacaacccgactttgattggaaagtccgcaaaccgttctttcatcgtgtcaaagtgttgctgggctaaaatcgttgtcggcaccaaaatggctgcctgtttgccataatcgattgccttgaaagcagcacgcaacgcaacttcggttttgccaaacccaacatcgccaaccaataagcgatccattggcttcggcttttccatatcatgcttaatttctttggctgaccgcaactggtccggtgtctcaggataaggaaactccgcttcgaacttgtgctgcaggtcatcatccggcccaaatgcaaaccctttttctgcttcacgcttggcatataaatcaattaattcgtcagcgatatcttcaattcgggcagctactttgcgtttggttttctgccactcagcaccaccaagtttattgacgcttggcgttttgccatctgcggaaacgtatttttggactagattcagttggtcaactggaatgaacagcttatcgttgttgcggtaaacaatcgtaatgtaatcacgatgcacaccgtcaacttctaatgtctccatcccggtgtattgaccgatcccgtgattaacatgcaccacgtagtcaccaggcttgagctcgttatagctgcgcaatcgctctgtattcgccagtgtttggtgccgtgcgtgacgacgttggcgagcattgaataactcgtgctcggtcacaacgactaatttcaagtcgggcagctcgaagccatttttcaggctgccttctgtcaattgcacctggcttggcaacagcttagtcggggctgtcatgacattgctaatctcaaaatctgacaacgtttcgctcagcttttccagccgatttttatctgtgatcaagaacaccacggtttgctgctgctttacccagcgatcggtttctgttttgagtaacggcatctgactgaaaaattgctgcacgttacggctgggaatattggtcaagctgtcaagtcgcaactgccccatgcctttttgaaaaaggctaaggtaaagccgcgggcgcttatcttgctgtgcaagttcctgaatcgtcaggttcggcgtgttaggtagcagacggccttcttcttgcaactgtgagtaccattctgccgtatcctgcaccaaggttgtatcgctatctagcaaacgactgtaatcatcgaatgctaccagtgcatctggttgcaaatagtcactgatgcgttgctgctctgggtatagctcggccgcatataaagctagattttcaggacgctcgtgtgccgatagctgctggccagtcgtcaataaaccatctgtaacggcctgcttagcggcggcatttttcacttttgccttgtaggcattagcttgcttggtaatgcgctcgccagcagcggccaaaacctgatcagtcgccaccatatcggttgccggcgcaatcgtgatctgctgaagtttttgcagactacgttgggtggcaatgtcaaagctgcgaatggaatcgatttcagtatcgaacaattcaattcgaatcggatcgtcttgattcaacggatagacatcaatgatgccgccgcgaatggcaaactgtcccggcgcgctgactaacgaatctcgtcgatagcccatggcgaccagctgtttggcaacggtttgcggatcaagctcggaagtcatatcaatggccaattcactagctgcccaatcggctggtgacggcaaaagccgcttataaccggccagactggtcacgatgatcccaggtttgccgctttgaataaacgtcaaagcattaatacgatcgttacgcgtctctggcgaactaaccgcgacttcagctgccaacacatcctcaactggaaaatcgtaaaccattgcatctccgagcaaactgcttaaatcagcagctaattcatcggcatgaaagcgattgttttcaacaattagaatctgctgcggtcgctgttgcaatagcgcgccaaaaaagaccgtcttggctgagcccgacagtcctgtcaccaaatggcgacccgttttcagcttcggccataatgccgacaatgctggatctgcctgcaccatgtcgatcaaattcatcgcgtcacctgcttctttcttctactaatgtacacatgtgcttcaccttttcgccatgaagtcacctatcttttaattaaacttattcatcagctgatcaaacggcatcccatttagccaatcttccaaggcatcatcagctttctcaatcgcatcatcgattaacggctggtcagttttggaaaacggcgttagtacccaatcaacgacccgttgccgcttcggatgctgaataccgatttttagtcggcaaaactcatcgctgccagtggcactgataatatccttgatgccgttatggccgcctgctgagccgcgcttacgtaagcgcaatttgcctaaggttaaatccatatcgtcttgcacgacaaaaatttcatctaattgtatctgataaaacatcatcagctcgcggacggcgcgacctgaagcattcataaatgtctgtggtttaacaaggaagatcttttcgccatttagacgggttgtcgcggtagctgcatcaaactccagcttgtcaatcgtcaggttcagtcgtttggccaagccatcaacgaccatgaaccccatattgtgtttggatcctgcatatttctggccgggatttcctaggccaacaatcattttcattggaacttttatcctccttggggaaaacgcgtttatagttgtaaggactttttttgtgagtgtttctatattctggccggacgagctaactcgcttatcttctggtagcggctggtcacgttttgctcggaaacgcgctcacaggcccagaagcatccacataagggccggatctgtgcgattgctttgagattcgataagcatcgtgcctttctagtagcggctagccacgcttcgctcggaaacgcgctcacagtcgcagaaacctccacataagggtcttcgacataaatggccaaagaccggccatttatatcgaagaccgcttatgctccggtttctaagcgctcctgttcgcgctctaacgcgaatagacggattttgccttttccgtccagagcagtataccatactgacgtcttgcgtctgtgcgagttgaccgtgggaactgttgaatttcccacattcgtgaaaacagatgctggaaacgcttacgttattggaagcttgcttgaaacaggattcacaagtcttgctgtagtaaggctcgacgccattttttgacaatggcaaaatcatgaaaaagtctatcaaatttgtttcagggaattgataatgtgttatactcaacgtgaaatgcagtttgcatgcacataagaaaggatgatatcaccgtggcaagtattacggataaggatcaccaaaaagttattctcgttggtgacggcgccgttggttcaagttatgcctacgcaatggttttgcaaggtatcgctcaggaaatcggaatcgttgacattttcaaggacaagacaaagggtgacgcgattgacttgagcaacgcgctcccattcacaagtcctaagaagatttattcagctgaatacagcgatgctaaggatgctgatctggttgttatcacagctggcgctcctcagaagcctggcgaaactcgtttggacttggttaacaagaacttgaagatcttgaagtccattgttgacccaatcgttgattccggctttaacggtattttcttagttgctgccaacccagttgacattttgacctatgcaacttggaaactttctggcttcccgaagaaccgggttgttggttccggtacttcactggacaccgcccgcttccgtcagtccattgctgaaatggttaatgttgacgctcgttcggtccacgcttacatcatgggcgaacatggtgacactgaattccctgtatggtcccacgctaacattggtggcgttaccatcgctgaatgggttaaggctcatccagaaatcaaggaagacaagcttgttaagatgtttgaagacgttcgtgacgccgcttatgaaatcatcaaactcaagggtgcgaccttctatggtatcgcaactgcccttgcccggatttcaaaggcaatccttaacgacgaaaatgcggttctgccactttccgtttacatggatggtcaatatggcttgaacgacatctacatcggtactccagctgtgatcaaccgtaatggtatccagaacatcctggaaatcccattgaccgatcacgaagaagaatccatgcagaaatctgcttctcaattgaagaaggttctgaccgatgctttcgctaagaatgacatcgaaactcgtcagtaatcatcacgatcactgataagtaagcaaccagcccagtcgctggttgcttttttttgtgagcgcgagcaggagcgtctagaaaccggagcataagcgaccatggccgtgatggtcggtttttgaccattgcagccatggtccttatgcggaggtttctgcgactgcgagcgcgttatggtgagcgcgagcaggagcgcctagcaaaccgcaaatatctaaatgttttttaataattctgtaacaccacggtaacacttgatattgtcactcatgccgcgtttgaaacaggtgatgttgcttttaattcgaccttcaataccttataatggcgaagtacaatgtcatcttatttgaggaagtgcttgccacgaaacaagaacaaacgaagaacaggaggcagcgatcagtgaagaaaaacaagcgatggctcctcgttgttggcgtcctcgtcgtactcatgggcggattttacatcattcaaagtatgcattatcgcgaccattttctgccaaacacagaaattctcggtgtcgatgtctccggccagaccgtcaacgcggctaacaagaaattgaccgaccaattcgatcaacgtcagtacacatttgttgaaaagaataaaaagattttgaaagttaaaggtgatgctttaggacttagccaagattttaaaaaaggcttaacacaaatccttaacaagcaaaatccttggcaatggacgacatcagtctttgctggtcaaaaaaccaatgctcaggaagaccctactattaacactgctgctctgaagcaattcgcaacttcgacggctgacaagttaaatcaaaatcgtcaggaaccggtcaatgcgaagcttgtgaccagcggtgatcagttcaagattcaaaaggaagttaatggtgatcaaattgatgccgacaagctggcgacaactgtcacaagcgcacttgataaccatcgtcaagtgattgaactaacagatgcttataaaaagccaacggttaaagcatctgatcgcgacttgcagacaactgaacgtgatatgaacaaacttgcaagcaccaaagtcagcttacagattcaaagcactaccgtcacggttccgcaagcaactgttttgagttgggtcactaatgataatggtaaggcaacggtttcttcccaagccattacaaattatgtcacggccttgtcgcaacaatacagcaccattcacaagactcgtcaatttaattcccaacaacaaggtaccgtttccgttcccgctggcacttatggttggagcatcaacattagcgccacctctgctatgattcttgctagcgtaaaagctggccaagacttgaataaagaagtcagccacagcggatctggttatacaaccactggcgacatcggcaatacctacgtggaagtctccaaagaaaaacaacacgaatggtatattaaggatggcaaggtcgtcatggactctgacatcgtgactggtaaaccaggccaagatacgccgtctggtgtgttctatgtttggtctaagcaacgtaacgctaccttacgcgggaagaacgacgatggcagttcttatgccagtccggtttcttactggatgccgattgattacaccggtgttggtcttcatgacagtccatggcaaccaaaatacggtggtgattggtacaaagaacatggctctcatgggtgcgtcaacaacccaccagacttcatggcgaagttatatgcagctgttgacgaaggcacacctgtgatcgtgtattaaaaatagattcgctcgacccataactattctttttagcgtcacaaaaaggcttgatcccggatatcaaaggatcaagtcttttttgtttattctaaattgtaaacattagctgatcagacgcgactttacgccacttggcgctaatgttcctttgagtcgtttatcttcattgcctccggaaacggaattcaaaagatctttatcaacaaaacgctggaacaattaggcattcgtaaggccaagtggtacaacttcggtaatatcagtcatgcaacaaaaaaacaacgaacccattatttaatgacatgtcaggaacggtcactgcacttttaaaaacaatcgtttccgaatagcattgtgcaacagatataacattacctctgaaagtgatcttcagcatgaacagtccagaaaaacgttacaccgccagtgatctatggtatcataaagcaagattagaatattttaataaagtgatacctgtttgatggaggaaaacgaatgttaattaagtcgttagtattaaaaaaggagttcctgaccactgtcaaggaaacggtcacccttgaagacgcgctgaagatccttgaagactccggctttcgttgtgtgccgattctggatgaaagcggcacgatcttccgtggcaacatctacaagatgcacatttatcggcacaagtctcaaggcggtgacatgagtttgccagtgacctatttgctgaagaatgccaccaagacgattccagtcaatgcgccattctttaaagtcttcttcaacattaaggatttaccgtatattgctgtccttgatgaaaatgccaacttttacggtatcttgactcacgctaaactgcttggcatgctgtcagaagcttggaacgttgatgttggttcctacgtgctgacagttatgtcgactggcgagcgtggcgatctggccaaaatgagcaagattttggccaagtatgtgtccatttctgggtgtatcaccttggatgccaaacgcgacgagttcgtacgccgcaccctctttacattgccggccggaactgatgaaaacacattgaacgaaatcgtttcccggcttgagaaaaaaagcttccgcgttgttgaaatcgatgacttgcaatcaggccaaccaatccgcatcgatgaagatctctaatctccatgtaacgctcacataaacaaaagaaggtcgatcgtttaataaacgaatcgggctttttttgtaagcacgtgcagaagcgcttgcaagcctgcaagtgccctatggtggtgcgtgtgttggtgcatgatcttgaacatgaagaacctgccttaagaaccttgcgctttgcgcgaaaggtctttgctgtccacctcatcaaaaatccactataatatgggataacgcattgcttgttgttatcgcgctgcatactaaacgggaggaataacgtgaaacgtatcactcgttttttcgatcagatcgcggccagcatccacttttttaagacacatcgtctcaagcgcaattatcgacgagcacttttattcttcgcgatattgttgccagtttgtgttgtcgcaattatagcaggtcaacggttacatcagccgacaccgtcaagttcgaaagccgctatcgctctatcaaccacaaaaaagaaacaacaacgtcacaaggccaccagtaataaaaccaaggtacatacagccccgaagaacattgactggacagcacctcccgagaaacaggcttatcccgacctcacccagcatccgaacattactttagatgtcaatctaaaaaagcaacgggtttttatcaaggaaggcgacaaaacgctatacacgatgtatgcgtctactggtattgatgactcaaccccacgaggtgattttgcgattcaagacgaacggggttatgaatttttcaatccaaacgaacaaatgggcgcccattattatacaagcttttatctgcatggaacttatctttttcataccgtcccgacagatgtcggcggacaatacatcaaaaacgaggcggctaagcttggcaaagagcctggctctcatggctgcgttcggttgagtattgcggatgctaagtggatattcgagcatgtgccaacagggacgccagttaaagtgtattaaacaaataatgacgcaaaatgccgtccgacaacgcgatacattgttaaaaggcattttacgacatttaggcattctacatcaatttcattaaaagtctttcgctactattttcataaaggacaaacagtaatttgacacgtatcagattgtacaatgctgttatggttgttcacgccatctttaattttctatgacatgtttccaaatccacctatatcaaatctgcgagtctcacgattcatgtctgagaaacttaaccgagccaaccacaactatccgactgctcatgaaacaaaccgatttaattgtgactatataagttatatcgcgttgcaactcattgaaactggcatattggcttgctacaattaaatcgagcaggaggcatatgtcatgaagaaaaacttcataaatttcatcctaacgacaacgacagcgattgtcgttgtgcttcttgttacgctaggcgacagaataaaatcaaaacaagccgaagtaattgtcttatgcgctatattattacttgtttcggttttatatcacgcctataaacaacattacagtgacaaaagagaatcattcttcgtccctaaaattaacggaattggcttcagcgttaatccgaatacatttgaaggaaaaataatttggtacgtggttttcttagtggtcatcatttttctccttgtcactatctttacgtaatctctacagtatgactcaaaatgtcggacccaatatataaggcgtcatgctagtgtgtcctattttgcctaacatgacgccttattttaattataaattttatacttcaatgttaataaataacagtttttttccagtaagccatatattttacgacattacttatcaaaattctccgcaaaaatgccacaaagattacgaagttcaaatctttgtgacagtatattctgcctatactaggctctcacagcgtttcacttgccaatgttcggagcgatgcatcgacaccttccgcgcacatcctgccttcatgaatcccccagataactaaacttgggccgcgacggcaatcaccggccacatagatttgcgtgtcattggtcgtgaagttatcatttttggcagtgatgccaaattgatcaaaaagccattgttcagcgccagtaaagcccattgccaaaaccacaagatcggccttaattttcttttcggtgcctgccactggtttgaagtgatcaacctgactaatttctgcttctttgacttggccatctttgccgaagaaagccgtcaccgtcgaggcataggcggtaatatcgccaaacaatgctttagcctctttttgcccgtagccggttttcaaaaccatcggccactcaggccattgattttgcggtcttcgttctgctggcaacgctggggtgatttctaactgggtgatatcagcgcatccctgacgaatcgctgtgccaatacagtcattaccagtatcaccaccgccaagaaccagaacatgttttcccttcaactgatcatttgcggctggcccatcttttaaaactgtttgggtggctgctttgagaaaatctgtcgcttgcataatgcctgaaagttctctgcctggcaccttgagatctcgggcttcgcgcgcaccggtgcaaataacaacccggtcaaacgttttcttcagctcatcagccgtgatgtccttaccaacctccgtgtttgcaaccagttcaatccccactttagtcaacgtatcgatgcggcgctgaacgacatcttttggtaacttcatattaggaatgccatacatgagaaaaccgccaaagcgatcatcgcgctcaaataaagtgacggcatgcccgagctggttcaatcgccaagctgcagcaatacctgccggaccactgccgacgactgcaatttttttaccggtgcgatgcaggggcttaccagagtcaaccacccagccatgtttgaatgcttgctcgataataaatttttcgttgttacgaattgtaatgccagcgccgttgagtgcctgcacacaggaaacctcacaaggtgctgggcaaacgcgtccggtcatatccggcaacatatttgagcggctcaatcgttcaaacgcacgcttatcctgatcacgataaaccagatcgttccattcaggaatcagattatcgttggggcaaccactcacggctcgtccgccgccaaaaaagacgccatgatggcagaacggaataccacagttcatacagcgcgctgcttgcttacgacgttcagccatgtctaaatcaagttccatcacattaaaatctttgatacgctgcatgatcggccgcattggatcgtcttgtctaaggtattttaaaaacccttttggatctgccattctgttccctcctcgtaaacgcgttcaccagcccagaaacctgcgtataaggacctcaagcacactggccaaagcccggccaatgcacttgaggccgcttatactccggtttctgaccgggctggttcacgctctctatttcattgcttcatcaaaggctttttcaatcacttgttcttctgaaagtcccggtttggtgtaagcatcaatcaagtcgcgcattcggtgataatcgcgaggatagacttttacaaacgtacctttttccttttcccagtgatccagaatcatctgggccgtttccgagtgagtatactggacatgctttttaagtagttcaatcagaatactgtcgtctccagcttcatccaaatgataaagatcaactaggtcttgactacaatgcttcgcaaaatcgtgtgtccagtcatagacatatgcaatgccaccggtcatccctgctgcaaaattacggccggttcggccaaggatgacggcgacgcctccggtcatgtattcgcacccgttattaccaacaccttcaacaacaacattggcgccagaattgcggacacagaaccgttcgccagcacggccattgaaataagcttcgccaccagttgcgccaaaacacgcaacattgccgacaatcggtgaatgggtgtacagttctcgagcttgtggcggtgcagcaacgattaagcgaccgcctgacaggcccttgccaacatagtcattggcttcaccgaccaacttaatggatagtccttgggtaatgaacgctccaaaactttgacccgccgtaccgtgatagttgaaagccagttgtcccggttttaatccgtcattaccaaaatgcgccgcaatccagccgcctaaacgcgtgccaaccgcgcggtccacattattgattggtaggtcaatggttgtggtattttgatttttgagactagtttcagcaaatcggtctaaatccggccagtcatactttggcttgaaaggattggcctttttacgttcaattggaatcgttttgcccagcatccgatcatagttaagggttttggctttcccaaaaggtacataccgcggcttcagatgctcaccgtgacccaccatttgatcgactgtgcgataacctaatgccgccatctgttcacgcaaatcttcggccaaaaattgcatcatgtgaatgacattttcggggcgtcctgcatataacttgcgcagctctggattttgggtagcgataccgaccgggcatgtgttgaggttacatttgcgcatcatgacacacccaatagcaaccatggttaaggtaccaaaactgaattcctctgcgcctaacataatcgcaacagcaatgtcgcgccctgttaataacttgccgtcaacttccaatgtcgtgcgttggcgcaacttgttgagcgcaagcgtttgatgggcatctgctagccccatttcccatggcaacccacaatctcgggtggagtttcttggcgccgctccagtgccaccgtcatagccggagatcacgaccgtgttagcacccgctttcaccacaccggccgcaatcgtaccaaccccggttgaagaaactaatttcacattgattttggcatacggattgacctgttttaaatcataaatcaattgcgcgagatcctcgatggaataaatatcatgatgcggtggcggcgagattagctgcacaccggcaatcgagccgcgaatgctggccacccaagggtaagctttccctgctggcaactgcccaccttcacccggtttggctccttgtgccattttaatttggatttcttcagcactcatcagatactctgtgttcacgccaaagcgcgccgttgacacctgcttgattttgctgttgcggttcagaccatctgcaccgatatgaaatcgatttctgttttctccgccttccccggaattactacgtgcacccaacttgttcatggcaatggcaatggtttcatgcgcttcttcagagagtgccccaaaactcatcgcgccggatttgaaccgtttcacaatggaactcaccggctcaacttcgctcaacggcaccggtttacggccgttttgatcaatcgtccacatcgatcttaaggtcactggattttcctgttcttcggcatccagctctgccgtgtactgttgataggcctgatagtcgccgttcctgactgctttttggaattgataaatgctcttgggattgtacagatgctcttcaccatcggccttatattgaaaactcccgccagaaggcaaatcgtcaatcgcgtgattgctgaaggctcgctgatacttttggtaatactcgtcttcaagctggttaagattgatgccaccaatccgagttggcgttccggtgaagtattggtcaatcaaactatcagccaaaccaactgcttcaaacaattgcgccccttggtagccggcggttgtcgaaatccccatacggctcatgattttgatgatccctttggtcgccgcttggcagtaatctggcgattgcgcttcaaggccacgttcctttagcgtcaagaaagcgccatacggatgaatggcagcggcaccgtaaccgaccagacaggcaaaatgatgaatttcgcatgcctctgccgtgtcaacgacaatagacgcagcagtgcctttactttgccgtaccaaataattatgcaagcctgatacggccaacaaaaccggaatcgtcatctgattgtcagcaactggtcgatcactcaacactaaaatcgttgcaccgccatcaatcgcgttttccgcctgcgtgaaaagatccttgagcacatgcgccaaacgatcgggcgtatccgtcaaatcataagccaacgacaatttagcgacttgtaacatcggcaaatccaagttgagaattttagcatattcttgatcgcttaaaatcgggctgtcaattttaagcttgtgacaattttcagcagtatcgcgcgtacaatcaccatcgcgacctaaaaagccaaaagtcccaatgactactttttcccgtaatggatcaattggcggattcgtcacttgggcaaacgactgcttaaaatacgtgaacaaagattgcgattttttactcaaaactgctaaaggcgaatcaaagcccatggcaatgaccggttcaccaccattttgcgccattggcaacaacgctgtttgaatgacttcgtgggtatagccgttgcgcagccaaagttttttcaaactgtcgatcggcatactttcatctgatttagcgtcaggtaattcccccaacgttaatcggttggcattgagccattgctgataaggatgcgcttcggcacaagcccgtttcaaatcacgagtcttcgaaatgcggccggtactggtgtcaactagtaacatctcagcaggtgccaagatccctttttcgacaatatcaccggggtcgacatctaccacccctgattctgaggcaacaaccaattgattatttttcattaatgtgtagcgtgatgggcgcaacccattacgatccaaaaaggcaccaacttgaatgccgtctgtaaagcacaaggcagctgggccatcccaaggggccatgaaagtagcattgtattcgtcaaacgcccgttgttcatcagacatttcggtaccttcgccccaagcttccggcaccatcatcatcaacgcttgcggaatggatcggccatgccgatagagatattccatacagttctctaacttggcggaatcagagtcagtttcatcataaatttcaataccatgactggtcatccaattttcggcgccctttaacgtgttgatttccccgttatgcgctaaaaaccggaacggttgagcacgatcccaactcggaaacgtattcgtggaaaaacgggagtgaatcaagcaaatggcacttttcatttgcgggttatgtaaatccgggtaaaaaagacttacttggtaagcatgaagcatgcctttataaacgatggtgcggcttgagaaagaacagatatacatggcttgccgatcaaaggttttctctaactgccgtcgcaatgcataaagatgatcctcaaagtcctgccctgcctgtgtgtctgtcggccgttggaccacaacctgaacaaagcccggcatagcttgttgagccgcgggaccacagttttcgtaaacaaacggaacattgcgcgtccaaagaaccggaaagccggcttcatcgatttgactcacgaccgcctttaacatggcggccttttcttctgcatcatgcggcaaaaaaagctgagccactgcatagtcaccttgcgccggtaacgttaattcatagcggtgcatttcgtcacggaaaaaagcatccggcattgccattaagataccggcgccatcacctgtatcaggttcagcaccggtgccgccgcgatgattcatgcgttgtagcatggtcaacgctttttccacaatttcgtggctagcgtgaccatccacttgcgcaataaatcccataccacaggccgcatgctcaaattccggtaggtacattaattttttgtcatgtgctaagtgatccatgaaatccccaccttattagttaacatcaatgtcttgagcctaaagatattggtctcatagtattctaataatgacaagattacaatgcttttttctttgtctgccgtttcacatttggctccgaagtctatcaaagcttgcagaatccgccatctggtcacaatcaaaagcagtgcatcagactgatttaataggaaatcagactggtgcactgttagtcatggtcggttgcaagatctttttttattttttagttgtttaagataactgccatcattttctcacgatagcggcgtgaaagtggacgattttatcaagtccgtacatgatcggcgcagaaatcgtcatgataatgaactcggaaagcatcaacgaaacataggttggtaaaaacattgtggcgaaacttaaatgccccgtccacacaatctcaacggcaatcaaggccatcgtgatcgtcatgacagcgatatttaaggcaaaccgggcccagagctgacgcaatttcggcgccacccacccgaccaacagcaagccgagcaaactttgaccgccgccaaagaccacgtcaagccaaccaagcggtgagaagatagcattgaaaatcacgactcctgtcacaacacccacaatatatttacgatcaaacacgaccaagtgattcaaactttcagacaagcggaattgaatcgcgccactggccaaattaaggctcgcgggaccaattgatagcacaatatagatagcagcgaccaaagcattaagtacccaaccgcgtgtttttagatttgtcatgaaagtcctccattaaaagtcacattatttcgtcatagcgcgtttgccggagcagaaacctgcgtaaaaggacagcgaatgcagtaacccaagccccgtcatcacgtttgaggccgcttgtccctggtttctaaccgctctggcgaacgttcaacaaaaaacgcgctgttaagcgcgttgctgttaattcttattatatgttttgggcttgggcaaactgaccagacccactgaaatcgccaacgcgcggtcgactgctgccattttggtgcttgacagagctgtcacgcgggcttgtagccgttgcttgtcaatcgtgcgaatttgctcaagtaaaatgactgagttgcgttcaacgccatcttgcttggcccgtaacccgacatgcgtcggcatcttgggtttttgaatcttggaggtaatggctgccacaatcactgtgggactgtaatggttgccaacgttgttttgaataataagtactggccggttgccgccttgttcggagccgacaaccggagacagatcggcgaaaaaaacatcgccgcgttttacggacacatccatgcttttgcccccttatcgctcatcgaatatgggcgtatgcctcgctctcgcaggcagagaaagcatgactgatctctgtattgatctggcccattgctacatagccagaaatcaattggttgatttcgggagcctgtgacttcaaaaatgtcgccactgcctccgtaatcacagcctgagcgtcaatgtcattcaattcacaataggcatccaaccgcgccttaatggcatcatcaaacgttaccgctactgacgtttgctttttcatgacaacttcctccaacttcccaagttcatgttgttactttagcacaaaatgggcatacgagccaccatcaatcgaccggattcacgctctgtcgcttcaggcgcggcgttaaattgcaggcaatttcgtaatgaattgtcttgctatatttagcaacgtccaacaacgtaatctcctgatcgccactttgcccaaccaaaactacctttgtgccagctggatatgctttgggcaaacgaatcataaactgatccatgcagatacggccaacaatttcacaatactgaccatcaacaaggacatgaaagccctgtaggcgccgcagccagccgtctgcatagccaatcgggacagtcccgatgaattcatctcctttggcacgataggtcacaccgtacgaaataccgtcaccagcatgcacctgcttgcaataggtcaactcacttttcaatgacaacgctggttccagtggaaacggtgtggttggaatcgcgtccccagacggatttaagccgtaaatagccaccccataccgaatcatattgccattgcaagccgcatgccacaagctggtagccgaattagaaacatgcacataacgcggccgacttggtaaaagattgaccagatgattgaacttgtcaacttgctgtttgaaataagtatcatcaggagcatctgccgttgcaaagtgagtgaagaccccctcaatgacaaattgcttgggatgcgcttcaacaaacgcaactgccgtcttgagtgcttgatcttcggtaaacccgatacgacccatgccggtatctaaagccagatgaatacgcaacggcggcagctctggctgtgcttctaacactggcaaagcctgttcaagccattcggtgctgctgacaggcaatgatattgtttgggcagcagcaatggccgcatactgactcggtacgatgcctaacaccaatactggttcactataatcggccttgcgtaatcccaatgcttcatccaagatcgccacacaaaaaccggttgcaccagctgctttagcaacccgcgccacccgcaacataccgtgaccataagcatcagccttgaccacagcgaaaagctgcgtctgcttttttaatcgtgcgacctcatgctggatattatgcaaaatggctgtttcatctattaataccgttgctggtcgaaagttaccgatcgtcacgttcaggaccttctttttctaaaattacctcggtgaagaccaaggtttcactgtgcgaaatggagacaaaagcctgaccggaaaaaggatgcttcgtcagaataggtttgcccaactcattattgagaatttcgacatcctgtaaggcgacttttcctaacccagtaccaaatgcctttgagtacgattctttggcagagaaacggccggaaagatattcaacggcgcggcggccatcaagttgttgataatttgctaattcagtcggcgtcaaaattttaaccgcaaagccgctgtttttttcctgtgccgcctgaattcgcgccaaatctgtgacgtccaccccaataccgtaaatcatgggttgcctccttaaccgcgttgacatcgccggaactaaccactgttcctgctcacgctttgtcataaagttattctagcatgcttttacagaaaacgggtgtttggttgaagcaaaaaaagacctcaggacgtttaacctgaggccttttgaacgctttaattaaaaatcattcgccattacggattttgaaactacgcttaacattcttgcgtttatcgctgaagttgcgttttttgtcgtaactgcgcttattatcacggttgccttgatagccgccttcgcgacgcttacccttgtaaccgcctttataaccgccacgattattgccgtgaccgtgattgctgcgaccgcgatgtggcagcggacgttctggcgtgattttaaccggaacggcactggcatcatccgggctgactgccttaagataagcggaaaccaactgtaacggggtgtagttttccaacaaggattcagccatagcttcgtacttttcagtatcgttagcttcgacttgtgccttgatcgtttctaaaccgctggagatctggcccatcaatgcttcttctgctgttggtggtttcatcggcagcatccgcttcttggtcaagtcttcgatcgtgtgcaaatattcgatttcgtttggggtgacgaaggtgacggaaacacccttgtgacctgcacgaccggtccggccgatacgatgaacataggaatcaggatcttgcggaatgtcatagttgtaaacatgggtgacaccggaaatatccagaccacgagcggcgacatcagtagccactaggaagtccaattggccactcttgaactggcgcaaaacgctcatccgtttttgctgtgtcaagtcaccatgaatgccttctgcccgataaccacgcgcctttagaccacgggttagttcatcaacacgacgcttggtccgaccaaagatcaaagccaagtctgggtcttgaacatcgaacagacgagtcatgacatcgaacttttcgtagtcttttgcacggacataatactgttcaacggtatcagctgtgagttcctttgccttaatcttaacggtgaccggttcatgcatgaacttattggtcaaacgcatgatggaagcaggaatcgttgcagaaaacagcaaagtctgacgcgcggttggcatttgttcaacaatcttttcaatgtcatcgatgaagcccatgtcgagcatttcatctgcttcgtctaataccaagactttaagattttgcaacttcagggtgtgacggccaatatggtcaaggattcgacctggtgtccccaccacaatttgtgggtgttctgataattgacgaatttgccggcgaatgtcggcaccgccgtacactgcctggaccttgattttcttatcttggcctaaacgataaagttcttcttgggtctgaatcgccaattcccgagttggggaaatgaccaatgcttggatactccggtcagccttatcgatgttttgcaggatcggcaagccaaacgctgccgttttcccggtaccggtctgtgcttgaccgatcacatctttgcctgccagaaccagtgggatcgtctccgcttgaatcggcgtcgcttcctcaaaacctgactgggcgattgcctttaagagatcatgatccaaacctagttctttaaacttcaaatgagttcctccttgagaattcctgcacgcgtttacccaagcgtgttttcaaaggaatccgcgggcatcacgtgcattttcagtaaatgacaaaaaaacatatccgaacaatagtatcatgctcactataaaaaaacaagtgccgagattcggccaagtcttgcataatcaccaaaagcttcagtcaacacatacttatttaagcctaaactgacatttttaaaagaataaaaaccgtcaaaacatgctaaaagccgtttcattttcatggaacggcctttatgcttacaacgctactattaagcacgaccaccagcgaccaaagctgacaaaacggtttccagatgcaatccgtgactcgctttcaacaaaaccatatcgtcatggttaacatcgttttgtaagtcgcgcgtcatctgttccttgtcatcaagcggataatagtgcaactgatcggctggatattttgctgccaatgtatcggcaagtgctttcatatcgctaccgtatagataaacaacctgcacttccttaggatcgagtgcctctgccagacctgcatgcaacgccggactttgttcaccaagctccagcatgtcccctagcactgcaatgtgacggccagttgccgtaaattcgctaaaatcatgaatgacggctttcatcgcggtcgggttggcgttataaacatcgcttagaatctgttcacctacatccccgatcaaccactgtgtccggttagccgtcacctgaaaatgagccaatgccttttgcatgatttcgggtttgacatggaatttgcggccaactaacagggctgctaacgcattgacaacattatattcacccataatcggaatcgagaacgtcagatcaggccaagcctcaactgtgaactcagtgtggttacgatgcccgctgattgaatgggcaaatatcgtattttcaggatgcaagccaaaagtttcgcgctcctgcgtgatcttcttcgcccgttcctgcaacaatggttcgtcaccattaaaaataaacgtaccatcatcctttaggccatcagtgatttccattttggcatcggcaattttatcccgggtcttgaaaaattcaatatgtgcttccccgatcatcgtaatcacggccacatccggttcagctaaggttgacagtgcatgtaattgccctggccgatccatccccatctcaagaaccaagacttcggtattgggttccatgctgagaatagtcattggcacgccgatttcattattatagttatcaggggttttaacgacgtgatattgtgtggccaagattgcagcggtcatgtccttcgttgtcgttttgccattgctgccggtgatcgccaccactttgggattcactttcatcaacagataatattgtgccaattgttgcatcgctttcaacggatccggcaccaccagcgtaatcagcttggtggtgacaggtaaatgatctgctgcaacaaatgttgccactgcgccagccgtagcagccgccggaataaattcgtgaccatcacgttcaccgcgtaacggcacaaacagcatacccggcttcaatttgcgtgaatcaaaagccagtccggtcaccacatgcgacccgtctgcttcagagagcggttgagctttcacaactcgcgcaatctctgccaatgtcatcttcataattaattcgactccaattcttcaacttcatcctgtttaagaacaggttaaaacagtccattattggcgatgatcggcagatgcagcatcatcaatcatcatccactgattcttttgccgcatcaaaacaagcattcccaatcgccggacatctgtatccgtcaagataccatcaggaacgaaccgagctttcggtgccaaaagtggcacactgattttttcacgagaaaaccggacattccggaaatcaaataccacgccatcttccaataatggtaaaaactgtgtatagacggcatgtgacacgcgagaaaagtgctgttgccgtaagcgtaaccagaatggttcctcattagcaattcgccgcatatacttgttaatggcgtttgctaagaaggtcgcaaataaagattcgttacgcagatacatattcaccataccgtttcgcaatggcaggtaaaccaactcgttttgcaatttgtagtaaaatggcgaacttaaatgcgttttggcatgtcctaagtatagcagttccgcaatctcgttaggcgtgagttcctgcaaaaatcgcgggcttgaataatctagccagcaacgcgtctgacccgctttactccgcaaaaagtcctgaacctgatccgcgccgtcgataatattgaaccaagtatgcggatctatctgttcctgctcatccacagggggcagcaataacagatgcttcggtacttttagatggtcgctcagcaaatcacttgctgaaatgccatatgtcaaaaacaaatgcgccaacggttcatagcgcacataaatcatcgcatttcgcacgtttaaaaccccttcaatactcccgacttaattatacgactttcatggcatcacatgcgttaagattaagagcgtaagtcaatccggtttctgcgctagctctcctcattctatctaagaaagagtaacctatgatgttacaaccatggcctaatcttatccctcgtcctgatttgccaacgattccaaaaacagcagccattccgcctgcttattttaagctcattcaaacaggtattttaccgatgaattggtggcttccgactaaggagccgacgagtgatgccattgacggcgtgggtatccacgcctttgcaactgttggcccagccatgacttcaagcgatttgccagcacattttttgccatttgccaaaaccgggcacgaatattttggcttcgatctccagcaggagccacgccagattcgctatattgataccgaagtcgaccagtggctgacagtggcgatggatttgccagctttcatgaagcaattgcagcctcatgaagcaaagttgccagaaatttcagtcgatccgcagatttttggacatatggccgtcatcgcgacagcggctgaatggccagcgctgtttgattacgcgcgcgaattcatggccggccaagcaattggcccatggctgcgatggctcgcccaatcaaaagaggaagctaagcggcaagtcgggatggaagaatttcattttctcacccgttaccagcccaacttcctcacacccaacgacacgctgacactgcagcatgtattcggctaatggttaaccgacttatggtcaggttggaatgcgaaggtgtccaaccaacgtagatcccgtttgattccaaaataaccaaacaaagcaagtcccaacgaaccaaagaagtccataaacaaatcacccatcgtgtccatcaatgccgcccggccacgcagtagctcgccgccagtcgccatgtaccgctgcatattcaatcctaataatccatcaaaggtgaactcataaaattcccagagcacgccgatggtggtgccaaaagctagtgcaaacaaggccatcaacaacgggcttgttgatgtcaaccgtttttgcggggtcaatgccgcaaaaatagcaaatcctaaaccggcgagcatcgcggcactgaataaatgttcaaacttatcccaataaggcacactgtagcattgcaatcctgtccccagtaaaacgcttaaaagaataaagatctcgaataagtaaattaaaaccggtggaaatctaaaatgccaccaccgctccatcaatcgcggtaagctgacaatcaatatgccggacgcaacctgcgccaataacatcatctgaccatgaaataacgagtggccgctgatataaaggccaccaacaatcaataagtaaagcaggtcgccaccgacattcagccagtataaaaagttagatcgttttgtcattgtttttgccccttttctttaatgtaacatgacgcggcaagtcatttactacctctttgtaagcgcttggtgtagactcaaagataggaggtgttatctatgccgatcaaaacattacctgaagatcaactcgtcaccatgagtcaatttgtcgtgaaagatgtcgctaaagcttttgactttccctattatgtcaatgatctcacacatgacgcaaattttgacactgagcacacagcaaccaagttagaatttgagctcaccttgttgaatgatcctgatccagaacggaccatcagcttttacagtgatgccagcgctgacccgattatgggtggtgctgcatcagcacaggtcatcgttgagtcagggattaccttcgtttatttaaatgatggttacaaggattcctacctcattatcattcgtgatggtaaagtggtccaaaaccttaagcttgaacaacaaattctgtccggcccagaggtagaagatttgattgataatgtgatgccaaaagcgaaatgatttttgatgtcaaaaggcagccggattgcggctgcctttttggtcgcttgtgatgcgtcaaactgatgatcgtgcagataatgacaaagcgctgatagcctctgaaacgtgagaaaaggcacaacgcaactaaagatatcttttcttgctcaacaaaaaaaccaccacgagggtggaaaagtttgggggaacttttttgggagtgtaagttaatgtgtaagcttaaggctgaaatacatctgccttattgacctaagtatagcaattcactaactcttaggtggttccattttcaacaacaattctgttcattttataaatccacttatatattcataagttttaactacaaaaaaacagccctattggctgtttttggtttatttcttgtccaaaccatactttatacgactttttctcaaaagttctcaaaaagtcatatggaataaggcttcacgaagtttattgtcagcgtcaactttcaaattttctcaacaagttgcagtgaatgcgtacaaattctcgtacacgaaaaatgtggcgtaagaccctctagctgacaaactcctaagcacacaggcataacaccagtaaataaaggtcaccattgattgctactcgtatatatagaagcaaatgaagtcatttcgacatttcatttgcttttttcatacacaattttcaatgaatggagactaacaactatgatgaaaacagccagacgatccgctgtgattgtcgcattggtatcgttgttcgtccagctctttatcccggtctcaatggcgcttgctgccagcatgaacaatactaaggtggcagactggcgcaacacctggcacctgcatttattcaatggcctacattggacagacgaaggtatgtggatgaaaaaggtggacggcaaagttgccttctgtgtggagcacggggtcgatctcgacatgagcggctccggttacaaccccagcacctactccgacagtaagaaagaccagctagccaagattgcttactatggttactaccagaacccaaccaaccgcaactacgccgtgacccagatgattatttgggaaacgctcggcgattcgttgctcaccacaccgaacaagacctatcaatctgaaaagaaagcgattctcgataaggtcgccgcgcatgattgcaagccatctttcaacggcaagcaaatcaccctcgcagttggcgattcaatcaccttgactgacaccaacggacggcttgcggctttcgcccagcaaacggcaaacaccgcgaacctcaagattaccaagtccggcaacaagctcacgctgacggccactgcccagtcgaaggaatccggcaaggtggcttacgcgattgcgaaagccgctgacgtgggtacctcttttgtctacacgaaaggctcacaacaaaagctcgtcaacttcaagctctccaacaacggcgaatttagcctgccaatcaaggtcaacttgaacggcaatgtgaaggccaggaaagttgatgccgacaccaaccgagcacttcctggtgccaagctcaagtttgaatacaatggcaccaccaaggaagtcacgactggcactgacggctatgccgctttgaacggaatcaaagcaggtaccaaaatcaagatcagcgaggtcactgctcctaacggctacgtcaataagggcgaactcaaagaaatcaccatcgaacccgggaagaccgttgaagttgttctcggcaacaaggagcagctaggaaacgtgaccctcgccaagattggtaaagagtttggcagcgacatgtttaatgcctactactcattgaacgatgctgtctatgggatctacaccagcaccggtacacgagttggcgcgattaccactgacggcaacggcaagggaatcttgcagaacctcaagctcggtagctactacgcactggaagaaaaagctcctgctggctacgttctgaatacgactaagctgccatttgaattgaagtatgctgggcaaactgtcgcggtcactactgctcacgtcgatacggccgatcaagaacaacgtggtactgccaccatcgaaaaagttgatgccgttaccggtaagcagccacaaggcgctgccagccttaacggcgctgtctacgaactctaccgcgcagccgatgacaagctcgttaagtcagtgacgactgccaataattcagcgtccgtttccggtttggaactggacgattactactggcaagaagtgaagtcgccgattggctacatgcttgatccacaaaagtacacttttaagctggcttacgctggtcaaaacgtcacgactgcaactgctaccacaacggtcaaggaacaagtcattactggtgacctcgacctgatcaagtacgggaactacgactggtcaactcaaggtaaaggcactaagccggtcatgctcaaggacacccagttcactgtaaccagcaagactaccggtaaggttgttcgtaccggtctcaccgatacccaaggctacgtaaagttcacggatctgccttacgacacctacaccgtcactgaaaccaagaccccaacaggctacaacgggatcaagccattcacagtcgttgttgacggcacccaaaagtcccagcattacactattgaaaacaaggtgatcgaagaaaaactgcgtgtagtcaaagtcgataccgaaactggtaagaccgtgctgcgcgctggtgcaatcttccggattaagaaccttcaaaccaacaagtataaagtccagccaactgccggcaagaccggtacgactgataagctcgcgaccgacaactccggcgagttacctccgaagcgctcggctacggcaagtaccaactcgaagaagttcaagctccagaaggctatgtactggctaaggaaccagccaagttcaccatcgacggcagccataaggacggcatcgtggtcatcaaattcgttgacctctcccaaaagggtgtcgccaccttgaccaagaccggggctactccagtcgccgtcgaaaaggttgaaactgaatacggtgaccagtacaagttcaagtacgactacaccgccttagcgggtgccgaatttgaatttcgtgctgccgaagacttcacaacggctgacggaacaactcgcgcacacaagggtgacgtggttgctactggcaccactgacgctcaagggcagattcagaccccggagctgtaccttggcaagtacactgcaactgaaatctctgcgccaaccgggttcatcatgaaccctgatccaattgcttttgacctcaagtatgccgggcaagcagtgacggtaaccgccacctcacttgaagccaagaacgacttccagcaactcgacatcacgctcaataagcaggaagaaagcatctcgggctggaaggacaatctccctgaaatcaagaacgtcgcggcgaacggtcaagtcttcggcttattcacgcaaggcgaaaccacgatcggcgatactgtaattccatctgaatcgctcgtcgccaccacgacggtcaaagacgggaaggctgaatttggcgcgatccagttgccagaaggctactactacgtcaaggaacttgatgctggtgagaagcacgacttaaacaccacgatgtacggctttcacttccacaccaccgataacgagaagatcaaacacatcgacctcaatgacagcaaggtgatcaacaacaagctccatgaaaacgaactgtcattcaagaagatcaatgaagttgccacgctggtttcgggtaaaggctactcctacgcgataaccggtaacgctgctggtgcgatttttgaactgctcgacgctgataaaaaggtcattcagaccatcacggttggtaaggattccatcggttccatcaagcacctaccagtcggcaccttctatctccgagaatccaagccttctgccaccaaccttgtgctctctaaggaaaccctcaagctcgtgtctacaaaagacggcgtaacggtctttgatagcaaggataagcagattggcgagacaaaagctgataccaagaaaccaactatcgcctttgaactgaccaacgagttgatcaaggacacgggcgaactgaccaagaccgacgtttctactgggaagcggctgcaaaacaccagcatccgcattctggacgaaaacggcaagacggttgtatctggtcgcactgacaagaacggggtcttctcctttggcaatctgcctgctggcaagtacagcttccaagaatacgatgcaccaaagggctacgaaattagcgaagccctcgtgccattcgaaatcactaagaacggtgaaatcgtgaaggccgtcatgaccgacaagcagacacctaagcctggcctcccgcaaaccggtaacgcgacgtctggctggctcatcgtcatcggtatggtactgctgctcggcgtcctcgctgcaacggttgtaatcggtggtgccaagaagaaagacggtaagtaacatgcgcatttcttctattaacatgtaccccgatcccgatggcgacttgctgctccaaggcgacatcgtactggatcatgtactcatcttgaaaaacgtgaaacttatcgaaggtcagtatcgctggtatatccagttcccacgatacgcggatggccgcaccgttcacccaatctccaaatcattttacgattatctacttcaacaattaaccgaatactatcaccaagccacagtcgagtagccccactacccggctttttgaatacgaaaggaaggcacaacatggaactcaaatttgttgcaccaaacattgaaaagacgttcggccacctgtatttcggttcgctcaagcgcgaactgtcagaaggtgatcgcgacaatcgcaaggttgtctctcgcatttacgagttgttctccgacttgcagcgtaccgacaacatcgagatcaccattccagcgaagaaaggtgacaaggccgaaagcattgaagttgatgcgccagtcaccatcatcaaaccgcgcattgcgaccattggctaccggattggtgaacaagcctttgtgcgctatatctgcaatgccgacgatattgtcccagtcaaataaagaaaagaggaactcacatgcgattagcagaaggcatcgttatcgacttagaagaaacctttggcgtcttgaaattctccggccagcgccgcgaacgcttcgtgcaagacgaagacggcaatcgtactgacgacgtgaaggaacgcacctatgacttgaagtccatgaaacagggaatgatgattcaggtttccattccggccgaagctggaatcaaagacttcaagtacaaccagattgttactttggtggacccagtgatcgacaccgtggcaaacgcgaacttcaaccgcgttgaaacttcgtggtacatgaaagccaaggatctcgtgattgccaccgcaccggtcaagccgcaggagaagccaaacaccaatgacaagaaatagctgctcattgctccactcctcgcgcgcgccgcccactgtggcggttgcttaccactaacgaaaggagttgatccctgatgatgacttccacattgaccgtagttggtcgtgaagtgttcatcgacgactataacgaagaaatcgacaacgactaccgccttgaccccgacgagatcctgcaagacatgatggaactcatggaagaaagccctgaatcctaccaacacctgcatttcgacagcgaacagaccaacgacggcacgaataagctgttctcgttcacttcatacgagggtgaagatggcttacggctctcgtatctgggcgtcagcgatgaataaggatgtgagattgattcaaccacaaaattttgaaatcaccgaattcatcgaagactacatcagacttgtcagaacggatggcgttctcccaagcgctgattttttacgggaattggtcgctgatgccgcagcacaggcaatggacggtcaattcattatctgggttgatgccaacatgattgatgacgaaccaaaggaattcattttcaacttgcttgaagacaccgtgatttatatgggtgtggattgaatttcgtattatcacaaatgaaaggagctcgaaaatgtccgcaatgaatatcgacggattcttggaagactatcccgcgctagttgaccctgatttccatgatcctagcccggacgctttgattgacatggtgctaatggctgccgaacaggcaactggtggcgaaccgttttccatctgggtagacggcgaatgtacccgcgatcacgaatccaaagaattcagctttaatatcgacaccgaagaccgacaacccgctatcaaatacattggcgtcaagtaacgcccaaaggagaatttctatgaatgatcaagtaaccctcgtcaacttggacgactttcaacttcactacgaacacatcgctgactttgacaacggagcatcatccactggtgacgtcatcatcaacttaatcgacgcagctaatcacgcgattcaagctggcatgaatgcttgtgatttgattttagccagcgagcagtgtgcgaaacccgaagcctaccttcaaggagcacgctttagtttcaacgtttcaagtagcccacttggcctcgtaattggctacgacggcgtaaatattgacgaatgaaattcacgtatcgcggtacacgggtctatccgcgtcaacgcaacctactctataacacggccatgaccgttatggttggcttgtgggtaactggcgctgccattgcctattggccgctgctaagacaaatcaactggaaattctttagttggccgaacgtggcggtcttgccttggtcatggctgccgctgattattaacagtttatgcacagcgctactatttggtgctggcttgtgggcatatcgaacttggtttgcggattcctacaagcagatggaacaccgccaaaaactcgcccgcatgatcatggagaacaagtggtaccaaactgaacagtcgaacagtgagagtttcttcaaagacttaggttcaacgcgtaccaaagagaaaatctcgcactttcccaaaatctactatcggctcaaggacgggctgatccacgtttccgttgaaatcgtcatgtcttcctatcaagatcagctccttcacttggaaaagaagctagaagctggtctttactgtgagctggtagacaagatcctgcacgattcttatgtcgagtacaccttgctttacgacacaatcggcaagcgtatcaccattgctgacgtgacctgtgaacatggctccatgcagctcatggaaacggtggcttggcactatgatgcgctgccccacatgctgattgctggtggtacgggcggtggtaagacctactttattttgacgctaattgaagcgttgctgaaagacggtgcccagctcaccattcttgacccgaaaaacgctgacctcgccgatttggctgacgtgatgacaggagtctattccaagaaggaagccatgcttggcgcagtagaagccttctaccaagaaatgatgcgccgcaatgatgagatgaagcaaatgcccggctacaagacgggtgagaattacgcctatcttggcttaccagctcacttcttgatttttgacgaatatgttgcttttatggacgccttgggacgcgatgccatgcaagtcatgtccaagctcaaacagatcgtcatgcttggccgtcaagctggcttcttcctcgtgttggcctgccaacgccctgacgccaaatatctcggcgacgggatcagagatcagttcatgttccgcgttgcgcttgggcgcatgagtgagttgggctattccatgatgttcggcgaaaccaacaaagacttttttcaaaagccaatcaagggacgcggctatgtgaacactggcggcagcgtcatctctgaattttacacaccactagtaccacgcggctatgattttctcaccgaaatcggtgccgcagctaataccgttcctgcaaccccaatagaataggaggtgccaaatgagcactgatgtcaaaatcgaaaaccgcgcgcaattcctcaacgactttcacgagaacgtgcctttccaatctgctgaggacgcggaagatcaacttgaatggatggcaatgcacgcccacgagtacccagactcacgaatctggatagcgctcctggtggactgacggctgatcgttttccgaagcgtttttggttcaatgtcaccactggcgacgacggtggcttgaccatgacgtacaccaacgtcgcagatgaaggtgatgaagaatgattacaccacagtttagaaacaagatgcagtttacagaagactacgccaatacaatcaaagccgggacaatgagtgatgccgaagacgccttaatggagctttgcgactacattgaaccctgggaagacggcgatcactggctagaattgaccgctgatcgcaccgtatcgggcaaatccgtgtatttctggttcacggctgatatttctggcgacggcatggttctcacttaccatgactgggcgcaccattactaatcggctgcatgtcggcaccaaaacaaaacctttgaaaggagcaagtcaatgactacccaatctgttcagcaaggctgcaccctgccgccacgcgcggcgtgcagcgcgaaagccgcaagcgtgagtggcagcggtcggcgtcagccgaccgcttacccccagtactctaacaggggggtattaaatacaacgtctgtgcctgaacacggggtagaaatgttgacatgacggcgttcatacgaaaattagcaaattgtggatggcaccgccaatccacaatttttatttatcaagaaaggagtgagccattcggacatggaagaatggacagacgcggttagatcccgccgaaaaaaactgggactgacccaagtacaggttgcccgccggttaggcgttacctcgcatcattttagccaaattgaaagtggccggactagccctagtgcatcgctgcaaatggaaatcgaccggctgctcaagaactggaacgatgaaccagaactaacgctaatgtttgactacatgcgtgtacggttcccgacacatgacgccaagactgtgatcaccaagattctcggtctgaccccggaacacctgatatttgaggaacatggcttctacggctattcggctatgtatatcttctccaacattcaggtcatggtggcaccggtcggctccaacctcggcacattggttgagatgaaaggccaagggtgccgcgagtttgaggggattctgcttagccacggtgagaactggtacgactacttcttacgggtcgatgaagctggtggcattttcaaacgagttgatattgcgattaacgacatggttggcctgctgaatatccccgaactggtcgataagtgtctgaacaacgagtgcatctccgtcatgcgatcgttccaagggctgcaatcaggaaagctcgtggatctcgacgaggttggccgaggcaatacgctgtacgtcggcacgatgaaaagcgacgtgtatttctgcatctacgaaaaggctgctgaacaagcggccaagcgcggcatctcgattgcttataccccaatcatcaaccgatttgagattcgtttgaaaaacgagcgggcaattaaggcgattgagaacatgctgataacccgtgacgctgaaaaggttgcgtttggtatcatcacccgctatatgcgcttcgtggatgaagtcccggacaaaagccgcttgaagtggccggtcaacgaacgttgggcatacttccttggcaaaggacgccagccgattcgcttaaccaccgatccccagccctttgacctgaacaagaccaaggcgtggctccaaaagcaagtcatgccaacgctcaaagtcatcaaagaaatcgacaactactttggcaccactgacttgcagctcatgatcaaggacgccgagctgaccgacaaacacctcaagctgattgaacaacagactgttggtagcgaagagctaggaggtgacatgtttggtcaatgacgtgctggcttcccacccgctgcgcggtaaagcattcaaggactgtgtgctgaacgtgtacgtctacaaggcagcactagtcggtgtcgtcgaacacaagaagtaccggcgcatctgtgacatgaatagttttggcttcacggcacaagactatatcgcttggcggcaccagcaacaagaacacccggcggcgctaattggccgcgatggacgtgccttaaactacggcgagttacgccgactgctttatcagacagccgaagattcaggctggccggtcttcgctacaccggtggaagacctatttttcgattaaccaactcggtcgcgattgaccgtgacaaaacaatcgcaattcaaaaaggagtgatggtcacaaattcaactaaaggagtatcaccgcaatcaaactagacgtcatctacaatcgcgagtgtctggaaggcatggcggacttaccgacatcctccatcgacatgatcctgtgcgacttgccgtatggcaccacagccaacgcttgggacaaggtgatcccgtttgaatacctctggggtcaatacgaacggctcatcaaaccccaaggcgcgattgtgctaaccgcaactgaacggttttctgcggacttagtgcaatcaaaccgagccttgtatcgctacaagtgggtctggatcaagaataccgtcaccaacttcgtcaatgctaagaaccgcccgctatcccggttcgaggagattctcgtcttctcaaaagcgggcacggccaattttggcaactctcctgataccaaaggcatgaactacttcccccaagggctgctcccctataacaaaaccgtcaactcgcgtaagtacgagaactcaaatcagttacacccgcggaatgcgcccgacacgtacacgcaagagtggactaactacccgtctgacgtactcaactacaagtctgatcccaccggctggcacccgacacaaaagcccgtcgatctttttgcctacctcatcaagacttacacccagccgggcgaaatcgttctggataattgtatggggtctggcaccaccgcgattgccacaatggacactgaccgccatttcatcggctatgaaattagcgaagaatactggcggcgcgcccttgaccgcatcaagcaccaccacgcaacccaaactgaactattctgattcgtcactcatgagccggtcgcccctgaccgcgccaaaacagcggtaatctcgaagggagccccggtcacaaaactaaaaatcaaaggatgattattatgaatttcggacaaaacttgtttaactggttcacctccaacgcccagagcttggtgctgatggcgattgccattatcggtgtttaccttggcttcaagcgagaattctctaagctcatcggttttctggtcattgcgattatcgccgtggggctggtgttcaacactgctggggtcaaggacgtactgttgaatctgttcaaccgcgtcatgggagcctagccgatggacgacatcaaagtctttattgccaatcttggcaagtataacgagggcgagattgtcggcgcatggttcacgccaccaatcaacaacgaagaactcgcagaaaaattaggactgaatgaccagtacgaagaatacatggttcaggactacgaaggccccgttgtctttagtgagtattcaacgattggcgagatcaacgaagctgccgcagccgtcgaagcgttgaaaggcaccgagatttacccagctatcaaagagcttattggcgaatggtacgacaacgtgatcgaactcgccgcacacaaggatgacattgcctgttatcacgttgcgaacatgactgagttggccgaagaactggctgacgaaggctggttcggcgacattccgccacaagttgaaaactatatcgactatgccaaggtcggtcgtgacctcgaaattgaaggaggtttcgttgaaacacctcatggcatctaccaattattagactaactctctgggctggcgctgcaaaagacgtcagcctttttatctcaccatgaaaggagatcacatgaagaaagtcagatcctacaccagcatctggtcggtcgaaaaggtgttgtacgccatcaatgacctgcaactaccgttcccgatcacatttacgcaaatgacgtggttcatcgtcagtctgtttgcggtcatgttgctgggcgacttgccgccactatcatccattgacggcgcgtttctcaagtatgttggcattccggccgggctaacgtggttcatgagccaaaagaccttcgacaacaagaagccaatgggattcttgcggtcggtgatcaactatgccattaccccgaagctcacctatgctggtaaacctgtgaagtcgcagaaagagaaacaaaccgctgctgtgacctacgtctggaggtaccacaatgaaatttccgattaagtatatcgaagacaatctcgtctggaacactgacggcgagtgctacgcctattttgaactgattccgtacaactactcgtttctaagtcccgaacagaagcaacaagtccatgagaacttccgccaactaatctcccagaatcgtgatggcaagctccatttattgcagctcgccaccgaagccagtgttcgggacactctcgaccgctcgaagaagttggtcaaggggtcgctgaaagacatcgccttccagcacatcgacggccaagcggaagcattgaccgaaaacgtcggtgacaaccaagtggactaccgcttcttcatcggctttaagctgttgctgaacgacgctgaggttaccgccaagtccatcttcaaggatatgtccttgggtattcgggacttcttcgccgagttcaacacaacgtttgctggtgacttcttcaccatgaacaatgcggaggtggaacgttacgccaagtccgctaagttccttgccgaaaaaattggtcgccggttcaaagttcgtccgctcgataagaacgacttcggctacttgttggagcacttatacggcatgacggggcaagattacgacgactatgaataccacttgccccgcaagaagtccaagcgcgacacaattctcaagcgatatgacctgatcaagccaacacgctcactgattgagcagcaccaacgctcgatcaagatcacccacggactggatagtagttacgtgacgtacctgacgctttccgacattgttggtgaattggagtttcccggcagtgaaattttttatttccaacaaagccagttcgactttccaatcgacaccagcttaaacgttgaaatcgtgacgaacaagaaggcgctgaccaaggtacgcaacaagaagaaggaactcaaggacttggacgaacacgcctaccagtccggcaacgaaacgacacgcggcgtcagcgacgctttagattcggtcgatgaacttgaaagcaatcttgatcagaccaaagacgcgatgtacaaaatcagctacgtcattcgcgtggccgggcgatccgaggacgaaatgaagcgccgcgccgatcagctactcgacttctacgacagccttaacatcaaacttgtgcgaccattcggcgacatgctggggctacacagtgagtttatccctgcctcgaagcgctacatcaacgattatatccaatatgtgaccagcgacttcatcgcctcaccgggctttggcgcgacgcaatcgctcggcgaaaaggaaggtatctacattggctacaacgtggacactggacgaaacgtctacttgcaaccagatattgccgcgcaaggtatcaaggggactgtcaccaatgccttatccgccgcttttcttggtagcttgggtggtgggaagtccttctctaacaatttgcttgtctactacgccgtcctttacggagcgcaggcactgattcttgacccgaagtcggaacgtaccggctgggcaaagaacctcgactttatggaagatcaaatcaacatcgtcaatctgaccagtgaggaacaaaaccgtggactgcttgatccttatatcatcttgtctaacttgaaggattctgaatcgctagccgttgatacgctgaccttcctcactggcatctcaagccgtgatgccgaccgcttcccgacgctacgcaaggcaatccgggcagtaacacaggcgcccgaaccgggactgttgaaagtcattgacgaactccgccgcgaagacacgcctattgcgcgcaacattgccgatcatatcgaatccttcacggattacgactttgcggcattgctgttctctgacgggacggcacggcggacaatcgcccttgaccgcaagatcaacatcgtgcagattgcagacttggtgcttccagacgctgataagacgcaggaagaatacatcactgcggaaatgctgtccgttgccatgctcatgatcatcagtacgttcgcaatcgatttcattcaccaagaccgcgctcaattcaagatcgtggacttggacgaagcctgggctttcttaaacgtggcgcagggtaaggcgttgtccatgaaattgattcgtgaaggtcgttcgatgaatgccggggtctacctcgtcactcaaaatgcggacgacttactcgacgaaaagatgaaaaacaatatcgcccagaagtttgctttccgtagtaccgacatcacggaaatcaagaacacgctgaacttctttggccttgatgccgaagacgaaggcaatcagaatcggctccggtcgctcgataatggggagtgcttgttccaagacatctgggggcacgtcggcgtgctgcacttcgactatatctttgaacacctacaccacgcctttgacactcggccaccgaaacccgtggaggtgatcgctgatgacgaaagctaaccgtcggcggctactgctgttcctcggtgttgtcgcggcattcatgttagtgctaatgctcgctggcggtcaaccggtacacgctgcgggattggttgacgatcagtctggcggctctaacgagtattccaagtacccgttgtcgcactaccagctcgactacttcgtcgatacgagttgggactggctcccgtggaactggggcgatggcatcggtaagtctgtgagctatggcctgtatgccatcaccaacttcttgtggatactctcggtctacctgtcaaacgctgcgggttatctgattcagcaagcctactcgctggacttcatcaaagatacgtctgacgcgattgggaagaacatgcagctcttggctggagtgtcaaaggacggcttcactactgacggcttttaccccggcttactcctcatgattacgctggtagtcggcatctatgtcgcctacaccggtatcatcaaacgcgagacctccaaagccatctcggcaatcgtcaactttgtggtgatcttcatcacgtcagccagcttcatcgcctacgccccggactacgtgagcaaaatcaatgagttcagttcagacatcagcaccagcgcgctcaacactggctccaagatgattatgggcactgatacagccaccgataaatcaggcgtcgacgcgatccgtgacactctgtttgaaattcaggtgaagcagccgtggacacttttgcagtttggcgacagcgacgctgataccgttggcaaggatcgcgtaaacacgttaatgaaaaccgacccgtttggcgacaaaggcaaaacccgtaccgacgtggtcaaggctgaaattgaagacaacgataacgagattctctcgccaactatgacgatcaatcgccttggtaccacgacctttgttgtcctgttcaacatggcgatcaccttgtttgtcttcttcctgacggcaatgatgctgttcagccagatactctttatcatctatgcgacgttcttaccggtgtcgttcttactcgctatgctgccgtcctttaacggattgatgaagcagaacattatgaagctttttaacaccatcatgacacgagttggcgtgacgctggtgatcacgatggcgttctcgctatcggcaatggtctacggattatcggccacctcaccgttcttcctcgtggccttcctgcaagttaccatcttcgccggtatctggatgaagctcggcgacctgatgggcatgatgcagctacacagctctgacgcccagcaaggcgcacaacgcttctcgcgtcgtgggaaccgcatgctacgacagttcgtcggtagtgccatgggtggcgcaatggccggacgcttcctgtcgcggggctatggcaaggggcgtggaacaccacagctcccgacaggaacgcaacgcgaacagactgcggacgctaccaaaccgcaacaacccaagaagccacgcagccaacgactgggtgagaaacttgccgatgtatctgatgtcggcaacaagctcaaggacaagactgaacgtggccttgatcaggtgaaggacgcaccaaccaacgttttatatggtctgcatcgtggtaagcaactgactaaggaggccgccgaaactgcgaaggacagcttcaaggggcggcgtgaggccaatcagcaggaacgcgacaaaccgcttgagcagcggcgtaagcaaatgcaagaacgcaagctcgcgatcaagcctaaagctgatcctgaaaagccaaaaccaacggctaccaagccgccggttgaaccaactcgtaagccaacaactgccacccctcccaagccaaagcccgaacaagctgataccagtgggcaacctaagcgtgctgccacgaagccaacatcaactcgacctccacgtccagccacgaagccgcaagcagaacccaccatcagaccacaccaagaactcactccgtcaacggatagacccaagaatccactgaccctcgtttccgaaaagccagccaagccacgcaacccaaagccacagcggatcaaaaaggctaaggggcataagaagcgatgaaactctggcgctggttagcgcttgccgcactcccaatactgttgattggcggtctgttttttgcagtcatcgcctctgatgatgacgaagaccagcccgcctctgcgatcacagccgacgcgatgaacttatccgctgaagtctataagcataagctgacagtcgaaaagtattgcaaggagttcggtatccccgaccaggtgatggtgatactcgccatcatgcaggttgaatcaggtggtaagggtggcgacgtgatgcaagctagtgaatcgctgggactaccagtcaatacactagataccgaagcgtccatcaagcaaggcgtgaagtatttcgcgtcgctactgaaaagcatgaaggctgcgggcgtagatctcaacactgcgattcaaagctataactacggtggcggctttattgattacgttgcgaagcacggcaaaaagtacacgctggaactggcaaccgcgtttgccaaagagaagtctgggggtaagaaagtcacctacatcaacgcagtagccaaagacggttggcgttatgcctacgggaacatgtactacgtgtcggtcatctcgcaataccttgtcacaggtggtgcgaagttcgacgacaaaacggtgcaagccatcatggacgaagcgctcaaatatcaaggcactcgttatgtgttcggcggctcaacgccaacaacgggcttcgactgttccgggctaaccagttggtgttacagcaaagccgggatcaaactcccccgcaccgcacaagcacaatacgacgccacggcacacctgaacatcaaagccgccaaacccggcgacttagtgttcttccactcaacctatgacactgccgactacgtgacccacgttggtatctatgtcggcggcatgaaaatgtacaatgcgggcgacccgcttggctatgccgacctgaactcaagttactggcaagcccacctgatcggcgccgggcgtgtgaagaagtaggtgaagacaatggatcaaaacggtatcggttattttgactggatggatctcatcactaacacctacgacgacgcactgcaaaaggcgcacgtcgatctcaaatttggtgacaatcgcgcactacgcaacaaggaactcgactttgcgtcaagcgaatgggaacgcatcaagttcttcaaacaacgcctgcccaacaccgacgacctctgccacgtcctcgaccgctttgttgaccgaatgccagagatggagtatgggcaccggcgcgagtatcgcctcgctgtcgcgcatgaagtggccgttgatcgatggctcaagggcaaggtgtttgcaccagaagaccgtaagtatatcctcgaccgcgaacgctacttggccgaagaatacttcaacaacgaccgtgaactcggtcagtatatcgaaaccgactatgagggctacaagcgaatctcactacaacgcctgttcgtgcgttttctcgatatttacgatgacttttaccgctgctatgaaaaaagaaaggacaaggtgaacaaaccttgaataaagatcaaaatcaaaagaaaggctggttcaagaaacagccagccgtcccaaagccgcctaagatcagacatcgcggcttgcgtcgtccggtcacgctgctttgctgggcggtattgatcggtagcaccagcttcggcgtctacaagaacatgaccgctatcgacacccacacggtgcatgaagtccaagtgatcaagaccaaggtgatcgacacgcacgccttggcgacattcactaccgacttcgctaagctctactactcgtggcagccgagccacgaagccctcgatcagcggcagaaagccttgcagccgtatcttgtggaacaactgcaatcgctgaacgcggatacggtgcggagcgatatttccaccacagccacagtgagtgaggtcaaggtctgggacgtgagcaagacagtcaaagacacgttccgcgtactatttacggtgaagcaagacctcaccaagggcaaagacaagaagtcagtgaccagcacctacaccatcaacgtcatgcaaaatgacaacggcgatatggtggtcaccaagaacccaaccgtcgctgcggaaccagcaacagctcgaatcaagttaccagacacccaatctgataacacggtagctagcagcactgccgatgacgtaactaagtttctcaagacgttcttcgccttgtacccgaaaagcgatcgcaatgaactcaaatattatgtcaaaaacggcacgcgaccaatcgaacgcaaccttaagttcgtggaacttctagatccggtctttaagaagactaagaacagcctgaccgtcaccttatcagtgaagtatctcgacactgacaatgatatgagccaagtctcgcaatacaccctgaccctatccaagcaaagcaacaattggtttatcactgacggtatctgacaaaagacccgacacggcctccacgcaagcatgcgcatgggtcgtgccgggtcttgtcgttattctgcttgcgtagcattgtcacgggcgcggactttacggggtctagaatttttggtgttggtagtaatcaacactggagatgctagaccctttttagatgacgaattgtcaactcaagtgcaactttttacccatgaagacttctgatggcgtcttccagcctaagaccttgcgtggtcgattattcagttgttcaatgtaagtctcaatttcctggtcgctctgaaggtctaggtctgtgttcttgggaaagtattctctaatcagtccgttggtgttttcgttagttcctcgttgttgaggcgcgtgtgggtcaggaaagaagacctttgtattcagacgctctgccagctccctgtaccgggcaaactcccttccacggtcaggagtcactgttcttactcggttagctggtaaggcaccaagcagctcaatcatgacgtctctaacagtgtcagcttttgcgttggccgttcgcttcgaaagcagatagcgtgatttacggtcaactaatgttactaatgcagagtgtcctgttttaccgcgcactgtatcgccttcccagtgaccaaaccagctgcgattttctgccgaccggggtcggtcgtgaattgatggcacgtcattgaagcgcccccggcgttcatttatggtgcctttgattttgcgcgtcttgcctcggtgtcgaagcagccttggtagcccgcgagcaccatggctcttcaatggaacgccgagattatctaggtagatacctctgtagatagtcgaatagctgatgcgaataggactgccttctagtgacaagcgaccggcaatctgctcaggcgaccaatgtagcaccgtgatatatcgaatgacagcgtcacgagtccccggtcgatcgaggatccgaggacgcctgctagccaagcgaacccgccggtagcggtactgagcggtggctgccgaatagttccgccagccgccgttacgtgcaatttcacggctgactgtactcttggaacgacctatctctttggcgatggtatcaagagttttgcctgtagagataccaagcagtatcgattcacggtcttttaaggtaagatgggtgtacggactcatagtcgagttctccttgtagttggtcttgtggtgattccattttacaaggactcaggctatgagtcttttctatttgactaatttgttgcacttgaattgtaaatccgtctccttaaataccctatcaagttcaccagacagcagattcccatcttcatcacaggctaccagctggcaacgacaccttggatgagtatccgtgactggaatcggtgcttgtccataggcaaatgtttgtctatcaagtggttcacaaatatcacaaacacggtcatcttcctcggttagccacatcacatactggacattctgttcatcatacgctctgttcttaccactgttgctattgcgtatagcttcattagttgttaacgtatgaattctggatagcatttggttcataggcgttgctaaattgtcatcaattcgatcaccgctttgaggaatatgaagtgccctacaattgttagacaagaagtctaagaacctgtctagtatctgctgaatctggtagaattgtggaaaaccgactgaggagtttgtcatgccagattatccaagcaatatttctcgagcgcaatttgcgttaatacaacctgatttagaaaacttccgcaagcatacaagaccgcgtcgttatgatctttatgacgtattcaatgccatcctttactcgcttactacagggtgtcaatggcgtgaattaccgcacgatttcccggaatggcacactgtctaccgctattacgatatgtggcgagataaaccagacccgacagctgattcgctattagaaaggcttttaaaaaaactgttgcttcctatcgctttgcacagggccgatcggcccgaacgtcgtttgtgattgttgatgctcaaagtgttaaaaccactgatttaacgaaaaatagtggctacgatggcggcaaaaagatttcagggattaagcgtcatatggcggttgatattaatggtttaccacaagccattctcgtgacacgagctaatgtatcagatcgttcaggtgcattggctatgtttagtttggctagccaaaatttagagctggttcagcatgtcatggttgatggtggctacactggcaatgactttgcggatcaggtgaagctcattttgaatgctaagacgacggtagctaaacgcaacgagttgcatatgttcacggtgttaccgcaacgatggatcgttgaacgttcatggagttggctagacaaatgtcggcgactttggaaaaactgtgaacgtgcccttaacagcagtcttcaaatggttgtattggccttcctgaagatagttcttaaaagatactagacaggttcttaggccggtatcttccagcgactttaatgcgcatccagcagcaaaccatcgatgtggaactttggttagtcgacgatgcttcaaccgatgaaactgccgaaaccgtcgccgcgtttgtaaatggcatccccaattatcacgcaaccgtcttttcccgtcaccaaggtatcggcgccgcacgcaattttggtattgaccatgcgactgggcggtttcttgcgtttgtcgatggtgatgatctgattgcaccgacttttgctgcgaccttgctgcgcggatttacccccggcgttgtcgcaacagctgtcggctatgactggtggcagcgtaaccgcggcggccctgatcaatttcaattgctatcacaagcggcaatgttcgaacaggtctcgcatcacggtaccgaaattggcggttatatttggaataaggctttccctcgtcccagcttaactgccgggcatattcgatacgatgagcgattgcaaattgcggaagattactactttactgctgactttgttgcccatacgcccggcatgtatgcgtacaacccaaccattctctacaccaaagttaaccgtcccgacagcacgatgcaccgattttcccaagctgatcggcgccaagaaactcaaatttttgaacgtattcatgaattaaaaaaattaattcagccggactagttgaggtgagaaactggttttgagcctgtattcccgcgagtttaggttaggtatatgtattcacgtttttaaatattcgccttatagttaaaataacttatgactatataagtgtactacttgcaatcagcagcaaagtcatgtataactattttagaaaacgtttccattgtgcgcaatcatattttactggaggtagttaaccgtgacaaacgaacagcagtatattctggcgattgatgaaggaacaaccagcacgcgtaccatcatcatcgatcacaatgggcaaaaagttgctgatgcccagcgcgaatttccacagtattttccacatcctggttgggttgaacataacgcaaatgaaatctggaatgctgcgttatccacgattgccacagcgtttatcgaatcgcatattcagccgcgccaaattgttgggatcggcattacgaatcagcgggaaacaacggtcgtgtgggataagcaaaccgggctgcccatttacaacgccatcgtctggcaatcccgtcaaaccagcgacattgcggatcaacttaaagcggatggctatgctgatctggttcacgatgccaccggtttgctaattgattcctacttctctgctaccaaaattcgctggattctggatcatgtaccgggagcgcaggaacgggctgaaaatggtgaattgctttttggcaccattgacacctggctgtcatggaagctttctggcggtgccattcacgtcaccgactacaccaatgcttcacgaaccatgctctttaatatccacaagttggattgggatgatgagatcttacggattctcaacatccccaagcaaatactgccggaagttcgcagcaattcagaaatttatggtgatgcagcagcctatcatttcttcggcagtaccgttcccattgccggtatggtcggggatcagcaagcagcgttattcggacagctggccatcgaaccgggaatggtcaaaaacacgtatggcaccggtgcctttatcgtcatgaataccggtgataagccaaccttgtcgaatcataatctgctaaccaccattggctacggactcaacggcaagatcacttatgccttggaaggttcggtctttgttgccggcagtgccattcaatggttacgtgatgccatgaaactgattgagcgttcaagcgactccgaagctgccgcacgagcatccaagagtcaaaacgaggtctatgtcgtccctgcctttactggcttaggtgctccttactgggactcggacgcacgtggcgccattttcgggattacccgtgggacaacgcgggaagacttcatcaaggcaacgttgcaatcacttgcttatcaatcccgtgatgttgtcgacacgatgaataaggataccggcatgccgatcccggctctgcgcgttgatggcggggctgctaataacgattatctcatgcagtttcaggccgatattctgggcattccgattgaacgcgccgccaaccttgagaccactgccatgggtgccgccttctttgccgggctagcaaccggattctggaacagcacagatgaactccagagcatcgtcaaggtcggtaagcgttttgaaccgacaatggacgtttcggaccgggaatcactttacgaaggctggaaacaagccgttgccgccacccaacagtacaagcacaccaccaagcaagactaatttattctaaagcacgatcttattgcgccatcatttatcttatttaaaaaggagcctactcaaaatggcattttcaaaagaaactcgcacccagacgattgatcaattgaagcagaccgaactcgacttactcattgttggcggtggtatcaccggtgccggcgttgcgattcaagcagccgcaagcggtttgaaaaccggcttgattgaaatgcaggatttcgcggaaggaaccagttcccgctcgaccaaattggttcatggcggcattcgttacctcaagacgtttgatgtcggcgttgtcgccgataccgttaaagaacgtgccgtagttcaaggaattgcgcctcacattccgcggccattcccgatgttgctgccgatttatcaggaagccggcagtacttttgacatgttcagtatcaaaatcgccatggatctctatgatcgcctggcaaacgttgaaggttcccaatacgccaactacaccgtcaccaaagatgaaattctgcaacgtgaaccgcatttagcctctgatggcctccaaggcggcggcgtgtacctcgattttgtcaacaacgatgcccggcttgttattgaaaacatcaaagaagcggcagaattaggcggactgatggctagtcgggttcaagccattggcgttttgcatgatgatggcggtcaggttaatggcttacaggttaaggatcttttggatggcagtgttttcgacattcatgccaaactcgtgatcaatacgaccggaccttggtctgacaagttcaaggcgttggatcaagcagaagatcaaacgccaacattgcgaccaacgaagggggttcacttggttgtcgatggttctcgactgccggtaccacagccaacgtatatggatactggcttgaacgacggccggatgttcttcgtggtgccacgggaaggcaagacttacttcggcaccaccgataccgattaccatggcgacttcaaccatccgcaagtcgaacaagccgatgtcgattatctcttgaaagtcatcaacaagcgctatccgcaaagccatatcacgcttgacgatatcgaagcgagctgggcaggattgcgaccgctgattgccaacaacggcagctccgattacaacggcggcggtgccaacaccggtaaagtttcggatgattcctttgaagcgttaatccgtgtcgttgatgattacgaagacaaccaggctacccgcgctgacgttgaacatgcgatctccaaactagaaacagcccacgccgaagctgctttgagcccatcacaggtttcccgcggcagctcacttcgccaagccgatgatggcatgatcaccttgtccggcgggaaaatcacggattatcggaaaatggcagcgggcgcgcttgctttgatccgccgcttgttggctgaacattttgcaaccgaaacacggaccgttgattccaaaaagctccaggtttcaggtgggcattttgacccgaccaacgttgacgatacgattgctttttacacgcggattggcatcgatgccggcttgccggaaaaagatgccgccgacttggccaatcgcttcggttcaaatgtcagccgggttgtcacctacacagatgggcaggcggctcctgggctcagccttaaggaaaccatgagcctgcgctattcgatcaacgaggaaatgaccttgacaccagtggattacctattgcggcggaccaatgcaattctcttccatgccgagacccttaacgagcttaaacagccagtcgttgatgaaatggcacgcttattgggttgggatgacgcgactaaagcccaacaattggcagaccttaatcaggctattcgtgaaagccaattagcagacttgaagaagacgccagcatcaaccaatcctgcgtagaaagaggtagccatatgtggacacaaacattaggtgaattcatcggtaccttcatcctggtactgcttggcgatggtgtcgttgccggcgtatcactgaataaatccaaagcgaatggtgctggctggattgccatcacactcgggtggggcttagccgtgacgatgggcgtttatgccgcggcatttctcggtccagcccaccttaacccggccgtgacgcttgcgtttgctgccatcggtcaatttccatgggcttgggtcatgccatttgtctgtgcgcaaatgctcggcgctatactgggagcggcagttgtgtggttgcattattatccgcactgggaagcgaccaacgatcctgcgacaacattaggcgtttttgcaaccggccccgcgattcgcagttatgcggccaacttcatatccgaattcatcggcacggctgtcttgatctttggacttttggcctttactaagggaaaatggacagacggcctgaatccaatcggtgtcggcatcctaatcaccgctatcggcctatcgcttggcgggacgacgggttatgccattaacccggcacgagacttgggaccacgcctcgcccacgccattttgccaatcgcacacaaaggcgactccgactggccttatgcttgggtaccgatattaggacccctggcaggcggcgtcgttggtgctttgatcttcacggttttgccgtaatctatccttagaaactcacaacgtaaaaaaaaccgccaattcgtcgataagaacgaatggcggttttttggtgagcgcgaacaggagcgcttagcaatcggagtgtaagtggcctctagcctaaatggctggtttttggccatttaggctagaggtccttacacagagattgctgcgactgtgagcgcgttatggtgtgagcgcgaacccacgcggttaacacgttatagttgaaccctacttcatcagtcgtgccactcgctcccgcaaggcaggcacaacttcagccataaaccatggattgcgattgacccaaccatagttaagcggcgagggatggacaattggaaaatacgtcggtaagtaagcacgaaagtttttaaccgttgccgttaacgtcttttcccggcgcttgcctaagtaatatttctgagcgtaggcgccaatgacaatggtcaactgaatatgaggcattaacgctaacaaggacggatgccattttgcggtgaaatctttacgcggcggtaaatctccggacttaccttttcccgggtagtaaaagtctaatggtaaaacggcaattttaccgctgtgataaaactgatctttggtaacgcccatccatgtccgcagacgatcaccacttggatcattccaataggttttggttgtctgggctttgcgtcccggcgcctggcttgcgatcaaaatcgttgcgtcaggttcgatgtgatataacggatcccacccttgagccgtaaaggttgcattagccggatcctgccgaattgcttcaaaaatcttgtcggccgttgtcacgcttgaatccctccttgccgatatttgggccatgctttgttgcgttcgaaatctgcggcgagttgacgcgcatctttaatcagcggctccggataggccatcgttgccaacaacgcaatcgcattatgggaagtggccggtccttgatgcagtaagtaatcaaatacgacaccatctttttgagtcactttttcctgaaaatgccaattgatgcactgctcgcccatgatgtcggttagttcattgtcgtgcgtggcaaccacgaccaaactcggataatggcttaaccagttgatgacactggctgaggccgcaatacgttcgactgtattggtgccttttaggatctcgtcaataaacccatatacccgcttgtttgacgccacggcccttaacaaccggtgaatcgctttaatttccgcgacaaaataactatcgccttcactgagatcatcccgaaccgccatggctgtcatcaccaatcccggctgcatcgtcaacttttcagctaaaaccgtattaatcgtctgcgccaaaatggcattcaccgctatgcttttaacgtatgtcgatttccctggcgcgttggctccggtaatcaaggcatttttgttccacgctaccggattggcaactgggtgtttcaacagcggatgcacgattcccgtggccgtcatgccgcctgctgcaaacgccggctggctgctttgcgaatgggccgtccgaaaattggcaatcgcaatcgctaactctaaatcgcccaacgcctgccacaaagtcaatgcctcgtcatggtggtgatataaccgcgtcaacacattattataagcaataaagcccaacataaacatgctgctaaaatactcggtgatcatgtcgcttgagctgttgtctcgcgagcgaaacacaaacgccaaccgggtaatcccccgcatgggtcgaacggcagcgcgcaaagcatcctgagtgggctgctgaattttgaccaaatgctccgcggtaacaatcgttcgcaccaagtagcccatcgccgttacttcagcgtccaaggcttcacgttttaaaacataatagaaaagattcaccatcaagctcaagacgatgatgctcaccccaacagtcgggagtaccagcgccagcaccaagccgaccagcggcaaactgcctaagaacctgtctagtatctgctgaatctggtagaattgtggaaaaccgactgaggagtttgtcatgccagattatccaagcaatatttctcgagcgcaatttgcgttaatacaacctgatttagaaaacttccgcaagcatacaagaccgcgtcgttatgatctttatgacgtattcaatgccatcctttactcgcttactacagggtgtcaatggcgtgaattaccgcacgatttcccggaatggcacactgtctaccgctattacgatatgtggcgagataaaccagacccgacagctgaatcgctattagaaaggctttaaaaaaaattgttgcttcctatcgctttgcacagggccgatcggcccgaacgtcgtttgtgattgttgatgctcaaagtgttaaaaccactgatttggtagattgtaaaattaatccgaacgctgttcggacaaaaaagatcagcttcctttaaaatggtgtttaccacaaacccatcttttaggagctgatcttttgtctagtatagtggctgcttaaaaattctataattcaggcagttaagctaatatatgcattattgcggtataataaatccattggaattagctgttttcctgcattttccttgcattttttgggaagctactcggaggttatcgtatggtctatcgtcacagcccgcttcaattgtcatttgaatcctttggtgccggtttaagtaccccacttagctctaacaatgagtgggtccagttggcggaggtcatgccctggaaagctctcgatgaggcataccaattggagttcaccaaaaatgcgggacgtgcggcaaaaccatttcgtttactctatggggcaatcctgatccaacaacggatgggtttaactgatcgtggggtggttgcggcaattcgtgatacacccgcacttcaatatttcatcgggttgtccgaatacaaagcggttgagccgttcaattattccagcctggcacactttcgcaaacgaattgccgatatctccgagctgattacgaatatcatgaatgatacagtacgcgccaagatcgaagcgttggtcccattcaaagtggacaccgtcatcacggacgcaaccgcagtgccagtcaaaatcaagtatcctcaagacaccgtcctcctcaaccaagcaaggctgaatcttgaggcgatggcgatcgatatggcacaccaacttggtgtgccaaacccacgcatgtacaaacgcgaggcgaagcattgttggacctcattttcacgacatccaaagcaacagcgtggtggctttcataaacaggtcaaggcccaacttcaatatgtgcgccgtgatttgcggtacatcaacgaattcatcgatcagggtgcgactctaccagatgaacaagcgattcgcttaggcgtgattcgaattctatttgaccagcaatggtacatgtatacccacaagactcaccacgttgaagaccgaattgttagtctccaacagccgtacattcgcccaattcaacgtggtaaggccaatgctaaagttgaatttggggcgaagattgactgttcgttaagtgaaggcgtagtcgacattgaacgttttgatttcaccgcattctctgagggccaagacttcgcggaaactttagaccactattacgaccttcatggacattatccggatgaagtactggccgatacgctgtaccgtaatcgggagaacctaaagctgtgtaaggatttgggtatccgaatctgcggtccgaagcttggccggcatccaaaacacgttgatgcagcgaaacggcgtgaggatactgatgccgagaatcgaagaggtaccattgaacgccggtttgcttttatgaagggcacgctggggcttgacttggtgaacactcggacagctgaatcactggccgtcaagattgacgcggccatcgtcttgagcaatgtgctgaccctgttaagggtatttgctataccaattttaattttggctaaattcgagggtgaggcctatcaaattcgctataaatttactacaagggtcgaagatatggtggcctagttcaacagccactagtataacctattccgaacgaattaaaatcgaaaccttttgtgaactagggctgtccaatatccaaatgggcgttcggctgaaccgatcaccgtcaacaatttcttatgaattatctcgatgtcaaccttatcaggctgaattagcacaaacagatgccgaatacaagcgatcacgatgtggtcggaaaactaagctgagcgatgagttaaagcaaaaaattctcaaccatttacgtctaagctggtcaccaggaatgattgctcacgaatttaaactagctactaaatctatttataattggctaaatcaggggagaattggtttctccttgaatgatctacctgaacatggcgtacgccaacggcgtaacgttgaccaacgatccaaatataatcaatctttggggcgatcaattgaacagcgtcccatgatgattaatcaacgtaatcgcatcggcgattttgaactagatacagtcgttggtcctcgtgggcatagtaaggcagttttattaactttaatcgatcgaaaatcacggttcctttgggcataccggttaaaagatcggacgacagcgactgttaatgaagcactaactaagttcctaaccacttttaatggtccggtgcacagctttactgtggaccgtggcactgagttttcctcaaaggcacgatgtgatcagtgactagatgtattccccacgcatgtgggggtgatccttagatagcatacaaacaggattagctataataagctagtcctgttttaagcttgtattaaaagcaattattgtgctccctgttgctaaatctgcaaacacggtataagcaaaaggtgcgaatccatttaaaatggctttaccacctatcaccaaaggatcactatccttagtaacttgttgtaagtgttcgattaaagcttgaccagttaagttgctcttaacagcttgcttaatcttgcgtttctgtaaccaatacataggttgcctccttatagaaaccaatgtgaaatttgaaagtcaatttaaaggctctggtgcaaagtttgcctggcaacttcattctagtatactgagtgacaagaaacgagggattgtgcgcatgaattactttaaaggacgccactttcaacaggatatcattatagtagccgttggctactattttaggttcagtctcagctaccgtgatatcgttgaattgctacgtgatcgcggggttagtgtgcattacaccacggtcatgcgttgggttcatcattatggtcccatctttaaggctttatggcgccaacatcaaacctcccataccaaaagttggaggatagacgagacttacattaacgtcaaaggtcattggacttatctgtatcgtacaattgatagcaacggtctgacgctcgacttcgaactgcgaaagcatcgtgattatgcggcagcctatcactttttgaaacggcttttgacgaccaatggtcgtcctgatcgcttagtcaccgatcaatatcgagcaacacttaaggcagtgaagcacctgatgaaacaagactacttgagcaaatcagcacaccaatgttccaagtatcgaaacaatttaatcgaacaagatcatcgattcattaaacgacaccgggtgcggtcagcaagtttccaaagcatccgaaccgctagtgcaacactcagcggcattgaagtcatccatgcattacgcaagaaaacccgacgagagctaagcctcatcgggttttcagccgtggacgaattaaaagcgatggtgccagcataacctacaacaccctatcaacaactaggtaaaaggcacactctccgactatttgcaccagagcctcttaatggagtaattaacgccgccaaatcgtcctactctaacggaccgatagagggtatcaaccgtaaggtcaaggagctcaaacgtgcttgttatggcttctccaatcaggccaatatgttcacacgcgtctaccagctgattgcctagattatctaccacaataacgtcacgatggtaggcttatttgcctagattgcataattaaagttaccacccagaaaatgtgaaaaaagacctgtccgttcttgctaaaatggtgtttgcataacataccatctagagagaaggacaggttccatggccattataaccttaattgaacgatctcagatagaactgatgcaacaccacacgattcaatacatcgccgcgaccttaggccgctctcgtatttctattaggcatgagcttcaccgttgccctgaaggtgattactgcgccattatagctcaggatcatgccgatacttgtcggcatcgttgtggtcggcactcgattttaacgcctaagttgaagcggatggtaactgagaagctaaacctaggttggtcccctgaaatggtcggttatgccgttcactgtgcgccacacacgatttaccactggatttatcaaagacaagtcgattttcagccaagccaactctttgatcacggtaaacgtcataaaagaagacaagaccttcggtcgcgctataaccaagcagtaggcacctcaattgagattcgcagtgagtcagctaatcggcgaaccgaaaaaggacatttagagatggatacagttcgcggtggtcgcgggtcaaaggctgctgttttgaccattgtcgatcgggtgacacgtttaatggcgacaactaagcttgaaaacttatcacaaaatgctgttctcaagggatttgcaagactgatggtggactttccgggtccggttcgatcagtgacggttgatcacggtaaagagttttcctgcgatcaggcgcttacaaagcgctatcggataccggtttacttttgccacgcctatcacccgaatgaacggggcacaaatgaacggttcaatcgagaacttcgctactatttcccgaagggaacacagtttgatcaggtttcagagaccgatattcaacaagccacagcgcttatcaataacaaacctagaaaatgtctccgttggcaaaccccagttcaagcagtgagcaagcctctttctaggtggtaactttattattgcaatctaggtgaaaaatataatccaaaggtatcttataaagatgaagtcattattggtgttaattcaatgagtggccaaaaggcatttaagaaaatggtttattatctatcgtatgtgggacaagacactcctaaagggttctggtgcaaattttcctcgctgacttgattttagtatactgggtgccaagaaacgagggattgcgcgcatgaatcactttaagggacgccactttcaaaaggacatcatcttagtagccgttggctactatttcagattcagtctcagctatcgtgacatcgttgaattgcttcgggatcggggtatcactgttcatcacaccacggtcatgcgttgggttcatcactatggccccatctttaaggctctatggcgtcggcatcaaacagctcacgctaaaagttggcgaatcgatgagacctatattcgagttaaaggccgttgggcctatttgtatcgcgctattgacagtaacggtttgaccatggattttgagctacgaaaacaccgcgattataccgcatcctatcactttttgaagcgtctcttgacgaccaatggtcggcctgatcgattagtcactgatcaatatcgggcaacactgaaagcagtgaagcacctgataaagcaagactatttgagcaaatcagcccaccaatgttccaaatatcgaaataatttgattgaacaggaccaccgattcattaaacgtcatcgtgtccgctcagcaagctttcaaagcattcgaaccgctagtgcaacgttgagcggtgtggaaattgttcacgcaatacgcaaaagaacccgacgagagttaagtctcatcgggttctcagtcgtggacgagttagaagcattgttagctgcataaccttcaacataggatcaatagctggttagatggtcatctctcagactgtttgcaccagatcccctaatgcctagtcgttgacagagctgacgattctcgcgggtacgataaagtgtgtcagctaagatttcatcgggataataaccatgcacgtcgaaataatgatcgatggttgttgctaaatcttggctttcattgaacgccttaaaatcaaatcgttcgatatcgatcatgccatcggcaattgaagcatcaatcttgggaccaaattcggttcgttgtttggctttaccacggttaatcgggcgaatccacggttgtgccaagctaacaatccgtcctgggacccgatgggtccgattttcatacatgaacatttgctggtcaaaaagttcacgaatcacagccaatcgtttggtttgcctttcgttaagagaggcaccgtgggccaacagcacatcgatataacgtagatcacgtcggacatactggagctgtactttgatctgcttgcgtgtttccttagcccaacgccgcggttttctagcaaaagcggtccacttagcttttgcttcacgtttgtaggttcgtggaggcttgatttgcaactgatgagccatgtctaataacatttcttctagattgagccgagcttgatttagcagcgaagtatcttgtggaaaacgaatttcaattggcaccgcagtagcgtctgtgatcaagacacggagctcatcatctggcaataagctttggatttgttcgcgcaaggtatcactgatgatatttcgcactagttccgttatttgacccatgcgtcgtctaaaataaaccaaggttgagtggttgaacggcaggtcggttgtgtaggtgtctagcccgataaagtactggtaagccggggtatcacgaatagcggtaacgaccgaacggtcggttagatgttctgcttgcttgatcaaactggcaccgtaaagcagacgaaagggtttagcagcgcgcccacccatctcagtaaaaagaagttgataggcttcatcgagctgttgccacgggagcatgtcggctaattgaacccactcattgtcggaagaaagtggcacaccaaggccgttgttaaaggattgaaatgacaattgggtagcacgatgtcgataagccatgatggtttcctccaggaaaaataaaaagtgcaaggaaaacaggcgttagcccatgtttactttgcactaaatataatctttactattctttgatgccaataaagcttgcagttatgctgctttcaccagccactaactatcagacaattgaacggcgaactggtacacaggtttattttgcccatgcctattcaccacatgaacgcggcagtaatgagaaccgtaaccgggttttacgacgctttattcccaaagaccaagccattgaagagttaagcgatcacaagctgattcaaattaattggtatttgaattcacggccacttaaatgtcttaattggcatacaccaatcgagatcttcctacttaatttacgtcactaaatttcgttcaagttatttcttgcaatctgccaaacaaataaaatgactatggtaatcccgtacgaggtcaccacagtcattaatcattctataattagcggattatttagcttttaaattcccaacgaagatggacgccaccccggccaccaaggcggagatgaccaggccgaagaaggccgtgtcgtatgaaccgctcagctgaacgatccagccgattaagaggggaccgaagaagcccccgagttggccaccaaagttaatcgtcccgatctgggagccgtaagtcttttgcgggaagagttgggccgcgtaggagaagatcccggtgaaggctagcgacttgacgaagtaggtggccatctggaagatcactaaccaaaccaggctggtggacttgtagagtccaaacatggtcaggaccgttaaaaaggaggccaggataatcatcaggcgttcgtgatttttaaagatgtgcaccattacgtaaccggagatcaaggccgcaatccccccggcaatcgtcggcaggggtactagccaagccaggttggctaagttaatgtggcgggcgtttaggaagtaaaccggcatccaggtttccatccccttggtaatgatgtttaaggccagcccgatcaccacgaaggcccagacccgcgggtcgatttccttccagcttatcttttgccgttcttgtttcgttaccgcttgtccaccaccgtgaccgcggaagaagaggtagatgaccatcaagagcaagccaaaggcccctagccaaaagaaggccgaacgccaaccggtagcggcgatgattggcacgatgatgaagggggccaaggccgcgccggcgtagttagaagaaattaaggcggcggtcagttgggcacgcttgttgagcgggaagtcctgggcgacttgcttcatggcggccggtgggtaagggccctcggcgatcccaaacaggaaccgaattaccaagagggcggctaaggaccaggccagcccggtaaagatcgtcatcaccgaccaaaaggcgagggtagcgataattaccttacgggaagagaagcggtcggtcaaccagccccccggaatctgcatgattgtgtagcccaagaagaagacggaactagtcgcccccagtgcggctgggctaacggagaaatccttgccgatcgcggccaacgataagttgagcacggtccggtcggcgaataagagcatgtaaccaaggtataaaatcacaaaggaaccgagcgacagggcccggcggttgggttttgcatccatcatttatttgtatctttcttttctcatcaattatgctagtgcaacaaaactaagcgttagcaaccaggtcttgtaagcgaaacttttggaccttgccgctggcgtttttcggtagggcgtcggtttgcaagtagaacttaggcaccttgtagtgggccaggtgttcacgcccgaaggcctccaactgctgaaagtcaacggggtgtttgctgacgaccacggccaccggaacggcgccccactgttgatcattacggccgaccacggcaatttcttggatgcctgggtactggcgcaagacgttttccacctcggcggggaagatgttttcgcccccggagatgatcatttcatctaagcgtccgtcgacgtacaagaagccgtcttcatcgaagtggccgacgtcgccggttcggtaccagtcgccatcgtgcttagccgcaaacttggccggttggtttaagtaacccggggtcaaggccggggtctggatctcgatttcgtgatgctcacccaccaaacgcagctgggtggtgaacaggggcttgccgaccgaaccaaggtggtaaggcgcctcttcagccgagagggcaacgaactgcgagcaagtttcggtcatcccgtaacactggacaaccggcagtccgctttcttcgcaggcgttaagggacgcccggtcaatcgtcccaccgccgagtagcaccaggcgaaaggccgatgagtaacagcggtcgtttgcttggacgtcttcgagcatcttctttagcatgtagggaacggccgaaatgatcgtaaccggttcgtcctccaggatttggttgaccacttgcacatcgaaatggttgactaggcgaacgcccatcccgtaaatcaggccccgcattagaattgaaaagcccgaaatgtggaagatgggggcgacgcacaaccagaggtcgtttggcaacaccccgaggttcaaagatgacgaaatggcggaggccaagtggttgccgtaggtttgcaagacgccctttggctgaccggtggttcccgaggtgtacatgatcgaggccacggcgtctaggtcaaccgtcggcgtcaacactgccgccggggcagtgccggctgtcaattccgaacagaggacccggtgcccaccgtaatagcggtcggctagttggtcatcgactaagaccaggtcgagccccgcgtcgccgatttggcggctcagttcttcaggggcgaggcgccaatttagccaaacgatggtcttgtcggcggctaagacccccagggcggctaagtaaccagccaggttattgtgggtcatcaccccaacccggggctggtccgtctgcacttgaatctggccagcacggtgggcgaccaggggaaccagctgggcaaaggtgtaggcggtggtaccgtcgttaaccgccacccggttagggtttagtgaagcctgtttgaggagccaatttggaatctccatgacggcctcctacgggaacttcgggaacttattgaagtcggggtcgcgcttttggttaaaggcgtcgcgcccttcctttccttcgtcagtcgtgtagtaaagcatcgtggcgtcaccggcaaactgttggagccccgccaaaccatcggtatcggcgttcatggccgccttaatgaagcgaagggcggtcggtgacttctttaagatttcgtgacaccagtctaaagtaactgattcgacctcagctaggggcgccaccttgttaatccagttcatctggtaagcttcgtcagccgtgtagaagtggtttaagaaccaaacttccttggcccgcttgtggccgatcacccgggctaggtaccccgagccataaccggcgtcaaaggaacccaccttcggccccgtttgcccaaacatggcgttatcggcggcgatcgtcaggtcacaaaccagttgtaagacgttcccgcccccgactgaccagcccttgaccatggcaatcaccggcttggggatgatccgaatcaagtgttggaggtccaaaacgttgagccgggcgatgtggtcggggcccacgtaacccccgttaccccgcacggattggtcaccaccggaagaaaaggccttatcgccggctccggtaagaataattacgccaattgtgctatcatcacgacagatgttaaacgcgtcgatcatttcggcgaccgttaccggggtgaaggcattgtgcttttccggccggttcattgtaatcttggcgatcttatcgtcgcgttcaaaaataatttcggaatactccttaacgggggtccagttagcactcgtcataacaaactcctttacaaaatccagaggtacaaaaatgaatttacttgaaaacttaggcattcaccaggacttggtgaccaaagaccgcgttgaactctccatgcaggtccaagcaaagcacttgcaaccgtacgggatcgttcacggcggaattaacaccgtactggccgaaactgccgcctccctaggggctaacgccaacgtagcgccggagcgaatcgcggtcggggtcaatgttaccacacaacaccttcaagcgttacgggaaggggtaatttttgtcgttgcaactcccgaccacgtcggccgcaccctccaaacctggcaagcccggctgctggttaacgaccgattaacggctaccgcaaccatcaccctgatgaacgtcccagcaccaaccaacaatcataaacattaattcacaaattggctactattatgcttagaaaattgccgggtgaccattgggggattacctaaattgcattttgtaattttacaatctatctttagtattcgccccaatatttagacattgtttgtttaccaacgccagggttaaaactattagttggatcatttttcttatagtgcttgattaaggccggtgctgccaaatatagatgcccaacattgtgttcggctggataaacagcgtgacgctcatccaaaattttaagcatttcttttttaagttcatgcgcatcgacgccaggttttagaatataatcctggtgcataacgtgatcaagtaagtgaccataataaattttgtgttctattttgtcttcaatctctttaggcaaatgctcgaaccacttataatcattacttgccaacgcgatatctagtggcaaaatgtcaatactatcctgttttaattcttgatatcgaatcgcaaccccagctgttacatagcggtgagttgccgctttactggtctcattggcatcggcttcaaagtagtcgccactggctttgtcaaaataagatttgagatactctcgcgcttcttcaataccattaccagccattttcaattgtaggtaatggtcgtacttttcgtaataatcatctaaccgctttggcatttgattaggaaataaattacttaatgtttgaagcaaacgatctgggaaataaggtttgaaaaacggaatgtgcttcaaaaagcgttcgccccatgcttttagcgcaaacatttggggcaaatgacccgtaccaattttttcaatcacaattagtgagtctttaccatatttcttggccaatttataagcatttttatgcatatattcaccagaaacaggcaattctttgaatgtcgtcataatatggcgacgaatatcttccaactcatcgggattattcgttccaatgtaaaacatttgtgtttttttatccattgggaatgtatctaagcggacagccaatgccgcaacgtgaccggacgatccagatacttcatacaattctttaggatttgcattgtatcgaataggcttatcagattcaacgtcacgcacaacctgttcatgatggaacattgaagcatgatgttcagtagctggtacttgattcaaatcaaaattgcggttctgcaaattagtaataatctcttcgggcgttttgcccaaatcaatgcctaaatggttaactaagtgcatttcgtcatgttcatcaatccaaacatacaatgatagctctgtataagctggacctcttctgatcaaagcaccaccagaattgttgttaataccaccaatgaccgatgcacccaaattagatgagccaatgactgaatgtggttcacgtttaagtggtcgcaattcattttctaagtgaaacagtgtcgtaccggggaatgctagtacttgttccccattattgattaactgtaaatctttaattttcatgccgttcacaacaactgcagaacggtcataacctggggctggtacggatccctcagtcaaactagtgttggctgcttgcataataatgataatattgttatcatgcaaaatattaagcacacgccacattgccattaaagtggttggaaatacgactgcaactgcatcgcccttacctgagcggtaccctttcctaaaacgtaaagattttgctttgttagtaataacattttttttaccaacaacattgactagttcttcgactaagtccatattaacttctcccctctataacgtttgtaaaaaacgttttaatcattacgctttcaatgatacgctttttttgatgcgtatctggattgaagtcaatatttgagacagattttaagagacattcagaaccgcgtttaccttccacagctcaaataaatcatcaattgcgattaataacttatttgaaccctggaaagcattaaatcaggcggccatttggctcgtaagtgttgcaatttcaacttgtaagggggtctggtagcccagtgaactatgaattctcttcctattgtagaaagcatgcacatattcaaaaaggacggcagcggcagtttcataatcttcaaagaccggcactggataaacacattcctttttgagggaagcgtgaaaggattccattggcgcattatcatacggacaacccttacggctgtatgagtggcggatatgtagctcagttaaacgttgattgtaatcatcgctggtatactgtgatcctaaatccgtatggataatcaggtccccagtagcggtcctatatgtcttgaaaaccggttgccaatggcgtcaagtccccggtgatttcccagaatggcggtcagtttacaactattacaaaatttgttccaataaagctgagcctacggctgattctttattggaacaagttttaaaaaaattgtcattgctcggcgaacttaccaaggacgttcagctttaacttcctttattatcgttgacgctcagagcgtcaaaaacaccgctactgctgaaaacaaaggttacgacgctggtaagaaaatctcggggattaagcgccatctggcagttgatatcaatggctttccgcaggccattcacatgacgcgagcgaacgtctctgatcgagacggggccagtgcaatgatcgctttacatgccatgcatttacgccaggttcaaaatgtcttagttgatggtggttattcaggcgttaattttcagctcgatgtagccagtaatttaaacgcaaccgtgcaggttgcgaagcgcaatgagttgcatcgattcgaagtcatgccccaatgttgggtagtcgaacgatcttttagttggctagagaattgtcggcgactttggaaaaattgtgagcgtcaattaaccaccagtctgcaaatggtcgttttagcgtttttagcactattacttaagagattttagacagcttcttaaaaatggctgtacttggcgtgatttgccggctgattatccaaagtggtccaccgtttactactattggatgagttggtcaaaagcccccacccctgataaaccagctttattaactcaggttttaaaaaaattgtcgctgatcgacgattaaggcaagggcggtcagcccgaacttcgtttgtgattgttgatgctcaaagtgttaaaaccactgatttaacgaaaaatagtggctacgatggtggcaagaaaatttccggcattaagcgccatttagccgttgacatcaatggattcccgcaagctatccatattacccgggctaacatcactgatcgtgacggggcgattgcactcgtcacccttaatttagagcagtttaaattggttcgaaccatgatggttgatagtggttataccggccaaaattttgccaatgagattagcagtttaacctcagccaaggtaatcgtcgttaaagaaatgagttacaccaattttcggttatcccccaacggtggctcattgaacgttcatttagttggttgggaaattatcatcgtttatggcgtaactgtgagcgtaagctcaacactagtctcatgatggtttcgttagcttttatcaggttacttctcaaaagatactaaacagtttctcacaccacttttgatctttgccatttactatcatggcaatgaggctaagattgaaggattactgacggcatcacaagtgttcctgagtattgctttaccgtttgccatcatcccactggtcatgttcaccagtaacaagaagttgatgggtgagttcgccaatcatacttgggtcaagtacgctgcttggtttgccaccattgtgctggtaaccttgaacatctacttgattctccagacggttggcttgctgaaataaccgtttaaagacctttataaaaaataagtaggtttccgttatattctttataaaagtgtttagcagttgggagtcgttgacaatttaaaaatttgtctacggcttcttttcttttagtctaaaatagaggttaataactaacagggggattactaaatgatcaaacccgaaaagacaatcaatggaaccaaatggattgaaacgtttcaaatcaatgccgaagaacgggcaaccctcgaagatcagtatggcatcgatgaagatattattgagtacgtcactgataatgatgaaagtactaattatgtttatgatatcaatgaggacgaccaattattcatctttctggcgccgtatgccctcgacaaagatgcgctgagatacattacccagccatttggcatgttgctccataagggcgttttattcacgtttaatcaaagccacatgcctgaagtcaacacggcactttactcggcattggataatcccgaggttaagagcgtcgatgcatttattctggaaacactgtttacagttgttgacagctttatcccaatttctcgcgccattaccaagaaacgcaactatttggataaaatgttgaaccggaagacgaagaacagtgacttggtttcactttcatatcttcaacagacgttgacctttttgtccagcgcggtccaaaccaatctcagtgaactcgatcgtttgccaaagacccattttggtgtcggtgctgaccaagataaaattgatttattcgaagacgtgcaaattgaaggagaacaggtccaacggatgtttgagattgaaacccaagtcgttgaccgaatcgatcataccttcaacagccttgctaataacaacctgaacgatacaatgaaatttttgacaatttggtcactgaccatggctgtgccaacgatcattaccggattctatgggatgaacgtgaaactcccgttagccgggatgcaatatgcttggatgctgactttggggatttctgtcgccttgattgtggcgatgctgattatgctgaaggtctggcggaagatgtgatgggtgagtgacttgctgctgggtgggggacttttttggaatgtgtatagttgagcagttatgctattttgagcacccttcggcttctgaaatacgctccgacgaccctgaccccggccacataagacaaaaaatccagtaacgaacaaaaaccattcgctactggattttctgccttatgctctggggtcaacccgggtcttgtcgcgctcttattttttaccatttctttacccaatcaataccaagcaaaacattacccttctatactaaaagtgttagaagctgtctaaaatctcttaagtaatagtgctaaaaacgctaaaacgaccatttgcagactggtggttaattgacgctcacaatttttccaaagtcgccgacaattctctagccaactaaaagatcgttcgactacccaacgttggggcatgacttcgaatcgatgcaactcattgcgcttcgcaacctgcacggttgcgtttaaattactggctacatcgagctgaaaattaacgcctgaataaccaccatcaactaagaacctgtctagtatcttttaagaactatcttcaggaaggccaatacaaccatttgaagactgctgttaaggacacgttcacagtttttccaaagtcgccgacatttgtctagccaactccatgaacgttcaacgatccatcgttgcggtaacaccgtgaacatatgcaacttgttgcgtttagctaccgtcatcttagcattcaaaatgagcttcacctgatccgcaaagtcattgccagtgtagccaccatcaaccatgacatgctgaaccagctctaaattttggctagccaaactaaacatagccaatgcacctgaacgatctgatacattagctcgtgtcacgagaatggcttgtggtaaaccattaatatcaaccgccatatgacgcttaatccctgaaatctttttgccgccatcgtagccactatttttcgttaaatcagtggttttaacactttgagcatcaacaatcacaaacgacgttcgggccgatcggccctgtgcaaagcgataggaagcaacagtttttttaaaagcctttctaatagcgaatcagctgtcgggtctggtttatctcgccacatatcgtaatagcggtagacagtgtgccattccgggaaatcgtgcggtaattcacgccattgacaccctgtagtaagcgagtaaaggatggcattgaatacgtcataaagatcataacgacgcggtcttgtatgcttgcggaagttttctaaatcaggttgtattaacgcaaattgcgctcgagaaatattgcttggataatctggcatgacaaactcctcagtcggttttccacaattctaccagattcagcagatactagacaggttcttatacaattgcgcaactcgaatattcttctggtaaaccgtcaatctcaatttggaatatgtcgcttgtaacttagccatcaaagctgtaccaacgccacgtccacggtgtttttcatcaacaaaaaagccggcgatgaagtcttgttgcaagccacaaaaagcaatcaccgttgctccttcgcgcacaacccacaatgttgattgctgaattaaagggcgcaccagaggagcattacttttccaatattcagcgtgaataaactggtgggcctgtaaattcccctgccaccataaccgcataatttgatccaattgttcgcgactgggcgcgcttatttattcaattgtgtatggtgccataccgtccctcttttctaatatcaaactcttgttctttctatcaatcatcatactggttcaactggcaaaaatcagcttgaactcgtcacttgattttaccgaatcctaactttcttaaacggagatacttttctttttctcaatgtactgcgccgtataactggatattatcatcaatttccgcgaaattttttaggccattttttgggcatgatctacattttgtagattgcatgcttcaatcggtaggcgtatattcgtactttggaacatagattagctttaaggaggcttgcatgacaaccaaacatcagattttacatcgggaaattgttttagatgctgcaagaacgatggtcgcccaagacggtattcgggacttgacctttcagacgctggccaaggaactgaatatctgttctcagtcgctatataactactttccgaatctaccggcagtcattgaagcgttggggaccgaatttatgcataacctttaccaagagttgatagagaacgtcagcggtatctcaggcaaagaggcgatccgtgcttttgcagaagtcgctcatcgctattttgaacgtcaatagtcgttagatgaaattatttattttgtccatcaattcccagaaagcagtccatttgtgcaaggcaccggcgatgttattaacttgctgaagcgtctgattgtgcacacggagctgaagcaaatggcaaaagaaagttttgtccaggatttcattagtagtgtgcttggttttaccgttttggaagtcatgggatttttacctgacaataaagccagccgcgacacatcttttgaatctctgctggacatgtatctaaacgaaataaaggagtaaagtgcttatgatcaaagatgaatttaagttcatcggcaaaaataaattgatcttagtttcggtgcttgtcatcattttaattccttttctttacagcattttcttcttaaagtctgtttgggacccttatggtgatacacagaatctacccgtagccgtggtgaacttagatcagccggttacttaccaaggtaaaaaacttaacgttggtgagcagacggtcaataaactcaagaataacaaaaagcttggctggcattttgtttctaaagcccaagctgataagggaatgaaagccaacaagtattacacggtcattaccctacctaaagatttttcgaaaaatgctgccaccattctggacgagcatccccgaaaaatggatcttaaatatcaaactaatgattcgctaaattacatcggccaagtcatctcaggaatcggtctgaatgccttaaacagcgagattcgggcaaatgtgaccaatgcttacgccagtgcggtttttgatcaaatcaaaaccattggcaaaggcatgaaaaatgccgctgatgccgccacgcaaatcgacgaaggtcaagtcaagcttgacgatgggattgatcagtataccgttgccgtttcacaggtaaatgacgggattcagaccatgaaagttaaagtctcgccgatgtcttcacagattccccaactcgcaagcggcgccaatcaagttgcaagcggcttgcaaacactcaatggcagcaccacccaattagctagtggtgtgggtcaattagccaatgggtcaaaccaggtaaccaatggcttgggaaccttacaatccaaaaccggaacccttagctccggcgtcggtcagttagcatccggatccaaccaagtgacgagtggattgggaaccttgcagtcgaaaaccggaacccttagctccggcgtcggtcagttagcatccggatccaaccaagtgacgagtggattgggaaccttgcagtcgaaaaccggaacccttagctctggtgtcggtcagttagcaaccggctctaatcaggtaacgaatggactgggaaccctgcaaaccgaatcaggccaactggctaacgggatcacccagctccagactggttcggcaagcttaacaacaggggtaaagaactatacagacggtgtgacatcgctctctaaaggaattgatcagcttgcaggtagcaccggctctttagcaacagacactaactcgttggcaaccggttcatcggatttaaccaacggtcttcaacaattgagtggctctgtcgatagccaaaataagcaagcagtcgaatcagcagccaagcttcaagaaagcctcacaaagtatgaagccaccttaaaagccaaaaccaatcaagatccggatttggttgccggttttgaacaactcgagacaaatatcaatgctttaatgactcagaccgaaagcagtggcacgtcgctgtcgacgactcttaatcagaaactgattcctggctcaaaaaaggtttcagatggtctgacgacacttaaccagcgggttccgacattaacagctgctattactggtcttcaaaacggtgctacgaaaatcatctctaacaatgatcaacttgtgaccgggacgaatagcttgaacggtggcatcaaccagctagcaacaaaagcaccttcactggttgatggcgtcagtcaactctattccggctctggcaaagtttctggcggcttaagcaccttaaacggtcaaatcccaacgctcaccaatggcgtcagccaactctattccggctctggacaggtttctggcggcttaaataccttaaacggtcaaatcccaacgctcaccaatggcgtcagccaactctactccggttctagccaggtttctggcgggctaaccagcttgaacggtcaaatcccgacgctcacaaacggggtcagtcaactctattccggctccagtcaagtctctggtggcttaagtaccctgaacggtcaagtaccgaccctcacgaacggagtcagccagctggccaatggtgccggtcaggttgccaatggcgttggtcaattgaatgccaatgttccaacgcttgtatccggtgtcaaccaactcgcggatggcactagccaaatcaccgcccagagtggcacccttaaatccggttccactcagcttaaaaatggcgataaaaagtttgccaaaacgctctctagcagtgccaaaaaagtcaacggcatcaccgtcaccagtgataccaagaaaatgtttgccgcaccaaccaagatgtcgcataaacattattcatatgttcctaattatggacatgcccttgcaccatacgtcttgagtcttgccctctacgtcggtgccttggtctttaactttgcttatccaatccgtaaagtttctaaagccgatggcactgcgacccagtggttcttcagcaaaatcaccattggcgcagttgtcgccgttgcaaccgccattgttgaagcaacactgatgatggcagtcggtctgaacgtcgatcatgtcgggcaattttatctcactgcgattcttttctcgctaacctcgatgtatctcattatgttcctttcaatggcatttgataatcctggccgatttcttgcgatggtcgggttaatgttacaactgggcggctctggcgggaccttcccaatggagcttaccaaccagttttataacatcattcacccattcttaccgatgtcgtattcgattatgaacttccggaatgcgattacgagtggcattgcgtccaacacggttaccttgggttacatcgtcatcatcgccttcgcacttggctcattgttgttgctctggatcacgatgatcttgttacaacgctatcacaaaatgggcatttcacagcttgatgacaatcaaaagcttcaggcagttgaaaaataagttaacgttgtcgacctcttatcacgaataggcgccttgattgcgagaccttaacatcccgcgatcaaggcgcctatttatttacggttcttatttgtcgttctcccgtcgtgccgtcaaggctttccgccgctgctcaatgcgttcttcacgtcgacggtcatagtcgccaaataagattggattcactttaacatacaaaataatggtcataatgcccatcaggagacacaacatcatattgccacctaacaaagcgatggcgacaccgatcgtatcgatgaataccagaaaggaggccatgattttactcatccgaatcatccttcttcttttcatgactggtttgactaaagtctaatccgctcagatcattcaaatcaatatcatccgctgattcatcctgctttttagccggtgtctttttggcttcattagaacctgtctagtatcttttaagaactatcttcaggaaggccaatacaaccatttgaagactgctgttaagggcacgttcacagtttttccaaagtcgccgacatttgtctagccaactccatgaacgttcaatgatccatcgttgcggtaacaccgtgaacgtatgcaactcgttgcgtttagctaccgtcgtcttagcattcaaaatgagcttcacctgatccgcaaagtcattgccagtgtagccaccatcaaccatgacatgctgaaccagctctaaattttggctagccaaactaaacatagccaatgcacctgaacgatctgatacattagctcgtgtcacgagaatggcttgtggtaaaccattaatatcaaccgccatatgacgcttaatccctgaaatctttttgccgccatcgtagccactatttttcgttaaatcagtggttttaacactttgagcatcaacaatcacaaacgacgttcgggccgatcggccctgtgcaaagcgataggaagcaacagtttttttaaaagcctttctaatagcgaatcagctgtcgggtctggtttatctcgccacatatcgtaatagcggtagacagtgtgccattccgggaaatcgtgcggtaattcacgccattgacaccctgtagtaagcgagtaaaggatggcattgaatacgtcataaagatcataacgacgcggtcttgtatgcttgcggaagttttctaaatcaggttgtattaacgcaaattgcgctcgagaaatattgcttggataatctggcatgacaaactcctcagtcggttttccacaattctaccagattcagcagatactagacaggttcttagacaatttatcactaggactagcgttagctagcattttatcaattgcttggtaaaaggtagattgtaaagaaaatagggaccctttcagttaacatgtgctaaccaaaaaaagccctattttcttttaataccgtatttcacacggtatcgaataaaggtcgtccgtttaatacctgtatttcgggacacatcaatgtcactcatgccagctcgataaagcttaaaagcatgttgcaagtggggatcgtcttgggtgtattggggtttgcgcccatgatatttaccctgctgcttagctaaggcaatcccttgctgctggcgctcaatgattcgcttacgttcactttcggcctgatacttatagagttcaataatcaagttggtcatcagttgacgtaaatttgggtcagcaatccctgtcatggacggtaaattcaacacatctagggtggcacccttattttgaatggagttcatgatcttagtcaaatcctggttgtttctgcctaagcgatctaattcagtgaccaggacaatatcaccctcacgaatataggccagcattttttgcaggggaagtcaacactttttcagacagtttgctaagcgactttttgtgaagcttggtcatacaaggaaagccatgctactggtgcaagatagtctaagcgtgcttgtacccttacgcggttgtaaaaggtctcgatgtaagcgaagacttgcgctctcagatcattgatatctttaaattgtatctgataaatgagctctttcttcatgatggcaaagaagctttcgctccaagcgttatcacccggttttcccaatgctgagaagctacgttgccaatgatattggttgaccaactttgtcactgctttggccgtgtattggctaccacggtcactatgaaaaatacacgtttctggcaaagcccacctttggtgggcttgtttaagtgtcgctaagactaaatccgtgtccatatgattggatatttgatgagctaacactaggttgctgttcaaatcccttatttggcaaatgtaagcttttccttctgatgttgtcgtctgtgtaatgtcacttgataaggcttcaaacggcttaaaagattggtgtttcactagattgggataatcaccttgacgagcaaggcggctatcggtcaaactcttcggatgacgacaacgtagcgttgaatacagaccgccatcagccatcagacgggcaactcggtgataggaagctttattaccatttttacgcaataaaccgcagatgcgtttgggcccgtaagtgccctgtccttgatcaaaaaagtgtttgattcgttgacgatattgcctttctttggcgtttcgctttggcaaagctctccgccaagcataataaccactcgttgatacgtctaacaaacgcgcccaccttaccacagaaacagaggtttccctcaacataaaagcatacttatcgctgggggttacttctggagactggcaaagtaggcggcggctttttttaacatatcacgctccaatgctaattcggcattttcacgttttaaggcacggttctcagcttctaaagaagcaaacggcgtttgctttccatcttcggtatatagcttccgccaacgatacagggcactttcaggaacaccaagttcggaggcaatgattttaactggtttggaagagttaaaactcaaacgtaccgcatttttcttaaaatcttggtcgtagcgattgcgtgaataggtcattttgaggactcctttcggataaatcaattctcttatgtttctgtccgaaattctagtacagaccccatgcgttgggttcatcattatggccccatctttaaggctttatggcgccaacatcaaacctcccataccaaaagttggaggatagacgagacttacattaacgtcaaaggtcattggacttatctgtatcgtgcaattgatagcaacggtctgacgctcgacttcgaactgcgaaagcatcgtgattatgcggcagcctatcactttttgaaacggcttttgacgaccaatggtcgtcctgatcgcttagtcaccgatcaatatcgagcaacacttaaggcagtgaagcacctgatgaaacaagactacttgagcaaatcagcacaccaatgttccaagtatcgaaacaatttaatcgaacaagatcatcgattcattaaacgacaccgggtgcggtcagcaagtttccaaagcatccgaaccgctagtgcaacactcagcggcattgaagtcatccatgcattacgcaagaaaacccgacgagagctaagcctcatcgggttttcagccgtggacgaattaaaagcgatggtgccagcataacctacaacaccctatcaacaactaggtaaaaggcacactctcagactatttgcaccagagccgaaatatctactaccgggttgtttccgaatgaccaccatcctctcgataagaatctctcccacgaacagctcaaaacactgatttcataagctattgattaagaattgacctgtatgcattcactgctaccggtcgatttttttcgcgcagcaattctccatcaggtaattcgtcaaagaaatatttggaaatcgctttcataagtgaccagaaaatttgtctggaattaagtaacccaataaatcagacgaggaggataacccaatgagtagtgagcaagaagtgacgcgaatgtttattcgctatgtacaacaagccctcaaaaatgaacgaatcaatcggtataaggcctctcttcggcaaatcaaggaaataccactggaggcctggctactggaagaaatcgaagattcctatcatctcgatgaattcaggttgaccgatgaggaaatcgagcatcttgaagacttcatcgaaagtgagaaattatcaaaagcagtttccaccctttcttcgacagataaaacggtcttatatcaatattattatggcgaactcaacgacgtcgaaattggcaaccgtagtggcaaaacaagtcagggggtgaacaagaggcggcgacgggcactagcgcggattaaggaagcatacgaaaatatgtaatgaatacggaggaatgttcaatgcattatacagaggtcgataacctgataccggttatcttggcagcgcaggacggagacgcagaggcaatgtcccaactactcgatatgttcagctacgatttcgatcgcgaggctgcatacggaaaaagctatatcgatcccgatttgaggcaggaacttcaaatcaagtttgtattcagcgttcagcgcttcaacgtggctgaacacctatcgcaaccgtccactcaatcaagttcaaaactaactcgcacataatcaatttcaacttttttctgattttggtttcatttcgacccgttcccgctgtctgtatatgcagaagcgggattttcttttgctcgctgtgtcctttgacaactgaatagcgttgttcagcaacaacagccgtcgccatgacctcgcatgagtgagcgaacaccaaggccagatacttacacgtcactcccacgcaacgggagagctgattcactgtggatcagttagccggtcgcaaccgggttgaacaacgccgcctcaccaatttactgaatggaggtgatacgctcaccttgcacactaactcttgaagggaagtggcactatcagccaagaaattcgccatgaaatgtccttcgttttgagcgacggacaggtcgatacgatccgcaacaaggtatttgagattatccgtgaagaagtaaacagcgttcggcacgaagcactgctaaacgtccgctacttcaagaaaggtgaagcctgcaaatatctcaacgtttcgtacaacacgttagacgtttggatcatgctgggcttgcccaagatcacaatcggtaactcggtcagatttgatcgcattgaacttgataaatggatgcaaggcatgagtgttggatgttaaaataatgatgtcttacgcctcactgccttattgagcaggaggtcaatcattatgtcaatcaccaaaaccaaagctggtacctatcaggtcagcgttttctatccgaaagccgttcgtgaactcatgggcgtcgccggacagacccgttttcgggaaaccatctcgaccaaacaagcagcagtcgcaaaggagcgtgagatcaacaagaaaattaaagaagcccaaaagaacggtaatgcccgttctcttgagcttaaaggtaagattctgttcaagacgttctacaaaatgtcttcatgccactgtatttgaccggttccactggtcgggcaccggttgtcccaacgaaggctactgtcgaataccagcgtgggttgttcaagaaccacctactgccaatgttcggctcctattccatgacctacctgaactccaataaagagttcgtcgtcgatcggctcaaggagaagtcagagcacttcgctaatatcaaaacggttaaggcgtatgtgcgccaaacgtttgaagtcgccgagatcctcgactacatcgaatatgaccgcgtaggcaagtccctccgccttgtcgggcaaccacacaaggacaagctcaagaaggagcgagtgaagaaaggtgagttcctgaccgcagagcaacttctggactggctacaagccacaaaagaggactatgagcgcggtaagctatctctagccgattacaccctgttcctgctaacgttgcacctaggcgaccgtaagagcgaatcctacgctttacagtggaagcacattgatctggaagctggcaagttgtatctggttcagtcactcgatggtgaccgcgacgcgaaggacaccaagggacacaagcaaagcattatgaccctgccacaggatattctatatctactggccgactggaaggcagaacaagccaagcagctcgaagcaatcggagtagagcaagatggtgagcagtggctgttcacctacgtcactcgtgagggtgttcgcaaccagccgctttactctgattacctcaacgcacggatcaagtcagtcaatcggcggcaccctgaattggtctacctgcatccacacaagatgcggcacacgttcagtaccctagcacgacaaggcggtgcgtcgatggaagacatctccagtgcgctcacccattccaatgtttcaaccacgcgaacttacgtgaacacaccggatataataacaacggtcacccaccaacgcttcctagatcggctgaattccgcaagactagaaaaacaaaaagacgttcagaattcaaactgaattccaaacgtccccatattgagccaaattctcgtacaaatcgcacccgttttgatgaatttgtacgaaaaccaacttttaagattctcgtcacgccgcggttcgtggccgcaatgtgacaaagtggtctttatttgctggtaagcccatacttcttgttgaaacgatcaacccgaccatcggcctgagtgaatttctgcttaccggtgtagaagggatgggagtcggatgaaatttcaacccggactaatgggtattccttgccgtcttcccacttaacggtttcttttgaagttttggtggaacctgagataaatttgaaaccagttgctgaatccataaagacaactggatgataatctggatggatgccttgcttcataatgattactccttttgccctaaatcattgcctgatctagagatactcttacaacaactctaatagtctatcacggtcatggttcaaacgcaatctcaatcaatcaactcaacatctgcgccgaggccacgtaatttcatgacgacacgatcataaccacgcaagatattatcaactttggtaatcgttgtcgtgccttccgccattaaaccggcaatcattaagcaagcacctgcgcgaatttcttcagctgcaacttcagtgccttgcaaatgatcgcaatgatgcaaaataatgacgtcattttcaatagtaatatccgcgcccattcgcaacaactcaggaatatgccgaactcgtttaggataaatggtatcaatgatcaagccctcgccatgagccttcagcattagcggcgtgatgggttgctgcaaatcagttgcaaatcctggataaggcatggttttaatctgaaccattttcaaatcaccagacgggtaaacgaagatactgtcctcaccgacatccatgacgacacccatttcctctaatttagctaaaaaggcatctaaatgttcggaaataatatttttaactttcacaccttcgccgatcgcagctgccatcgccaaataagtccccgcttcaattcgatcagggatgatggtatgtgagttgtgtgcttcaagggttggcacgccgtcaatccgaatcacatcggtaccagcgccacgaaccttagcccccatattattcagatacgtggctaagtcgataatttctggttccttggcagcattttcgatcacagtccggcctcttgctgttaccgcagccaaaatgacattgatcgtagcaccgacggacaccatatccaaaaagatgcgtgcaccgtgcaagccttcagctggtgccttgatggccatcgcgccgtgttcattgctgacggaagcccccagtgcctcgaacccttttatgtgctgatcaatcggtcgtggtccaatatcatcaccgccgggcaagccgacaattgctttaccaaaccgccctaataacgctcccatgaagtaataggaagcgcgcaaactttttattttgccatttggcagggggacatcgttaatttcagttggatcaatcgttaggacgttctcagtaaaatccgatttgacattcatgtcatccagaatcgccatcaaattatagacatcctgaatatgtggaactgaatcaagtgtgaccggggtgcgtgacaaaatcgccgccggaatcaaggcaacggtactgttcttcgcgccgccgatcacaacttcaccggataatttcttcccgccgtggatcagcattttttccattgagttaaatcctcacttaaaggtcgttcatttcaaataggctgaagctggcctgcatctatgcttcaaaataaactgcgatttctggtaggcgaggcacaacaaactcatcatgcactcaacatacaagtttaatgaattctatgggaaaaaacaaggactaaaagaacagagcgcgaactggtgcgattagaaaccggaatgtaagtggccttggtcgtgatggtcgctctttgaccattgcggccatggtccttacatgcaggtttctgcgccagcgagcgcgtttaagaacctgagctgccccccaagggcttcatctgccaaaaaagccgtctcaaagtaatgatacctcaggacggcctttataaatcaatgaaacctgctattaagctttaaaatcgcctgctgcctgaatgaaggctttgaataatccctccggcttgtttggccgcgattggaattctgggtgatattgtggggcaacgaagaacttgttcttcggatattcaataatttccatcaagcggttgtctgggctgacaccggaaaataccaatccgtggtcttccattgcctgacgatacttggtgttgaattcgtaacgatgacgatgacgcttttgaatttcatgggcattgtcataagccttcgctgcaacggaacctggcttcagaacacatggataaaggccaagtcgcaaggtaccgccaagatttttgacacccacttgatcacgcatcaggtcaatgatcgggtccttgatatcaggttgcgtctcagttgtaccagcatctttcaggcccagcacatcacgcgcaaattcgactgaggccatctgcatacctaagcaaatgccaaggaatggaatatcgttttcccgagcatagcgaatcgcggcaattttgccttccaaaccacggtcaccgaatccgcccggaacaagaatcccatcaaagccttgcaacaagctttcaacgttatcgtcattgacatcttcagcttggaacatttgcagatcaatatcagagtcccaatagtagcccgcatgcttcaacgcctcggcaacagaaatataagcatctttcaaagcgacgtatttaccaaccaaggcaatcttagtggtatgggtcaaatgctgaactttatgctcaagctgcgtccaagcacgcatgtcggcatcaggcacatcaaagccgaaatgatcgaccacaatctgatccatgccttgcgcttgtaatgccagcggaattgaataaagcgtctttgcatcgcgtgattcgatgaccgcattttccggaacatcagtgaaaagcgcaattttcttcttcatatcttccgtgatcggtttttcagtccggacaacgagcatattcggctgaatcccaatactacgcaattccttaacactgtgctgagttggtttcgtcttcatttcatcggccgcgcgcaagtatggtacaaggctggcatgaatatagaaaacattttccgaaccaacatcacgcttcatttggcgaatggcttcaaggaatggcaatgattcgatatcgccaaccgtaccgccgatttccgtgataatcacatcggagtcgctatgctttgcggcccgcatgatcttctctttgatcatgttggtaatgtgggggatcacttgaacggtcgcaccgaggtattcaccgcggcgttcacgttgcagaacttcagaataaattttcccggttgtgacgttgctgtacttattcaggttgatgtcaataaaccgttcataatggccaaggtcgaggtcggtctccgcgccatcgtcggtaacgaacacttcaccatgttgataagggttcatcgtcccaggatcgacattgatataagggtcgaatttttgaatggtgatcttcaaaccgcgattctttaacaaacgacctaaggatgccgcaacaatccctttacccaatgacgatacgaccccaccggtaacaaaaatatacttggtcatagccagtctccttttttaataatcgggaaaaaacaaaaacaagctccctattcatacgaacagggagcttgaaccgtattggctttacattttgtaaagcgcccaagctgtatattaactaattgtggcaaagacgtcaaggcctaaaacttaagtatgaaatgtcccaaataatcataaataacatcacgtctcaaagacagccttaaagtcagctttctgcttccgctataaatcctttaatcatggacttttctcggtcgtccctgacgatagggtgcaccattttgatgtgtgttttttgcctgctgaaaagccgcaaaccaatgtccgagtgttgttggattaatgttaagctctgcttcagctgctttcgcgaagttttcccatgctgttcgactaatttcagtattacctcgagcattgcgcgactcgcgaatgaactcgccaaccaaacggcggaacttcacttgctggtcatggctcatgcgcaaataatcttgttgcccagttgtttccatttgctggataccggttagttcacgagcatcattgtcgatcgtaaagaaggaacggatgggaatcgcaatgtacaaaatatacgctgccttgggcacaaaaatagctaaaatcataatcgcagcgatcatgataacattttctaagttgtgctccccataaatactggtataaattttccgcatttcgtctttatcattggcttgttgatgcacgattgtccttgatatgagtcgaaatacgacaattaccaaaaagtagatcgcaccatagataatcacagagatggattcaacatctcctgacatcagtcgcgtcaatgctggcaccagtgacagtaggaaaaccaagatgaattcccaaagcacgattcgtcgtggaatctgatcaacggtgctgaacaaagttgcttgctggtaccaaatattcgccacgaaacagaaactgacagcatacaccccaactgccaaaaagaaattggtaatgttggcatgatgttcccaactttgcgcaggcaactccaagaccataatggtaataataatcgcaagaatagcgtcaatgaacgtatctaaccgggttttaagttcttttgaaatcatcgtagatccccctcttgttagaaagtatcgtgctttgtcaaaaattgtcaacggtcttaaagcgtaaaagaacatttaggagcagtcaacttgtaacactcgcacttttaaggtttttaggataccacaaatagcggtaaaacacgatcatcttggtcagtatgccacttctaggatttgcctactagtggacctaaaatgagcttcataacaggctcgcagtcgcaaaaacctattcagccccaattcagaaagtggacccacagacgcagcaagctatatacgagcctccaaaactaaaacatcaaaaccaatccatgttgacctgtatcggctagtacttcgggtgctaattgcgcctgctcgcgcacacaaaaaaagccgtccccacaagacatgggcacggctcgccaaacattactttttggtgtcgctatcgtcatcatcatctgaatcgctgtcgtcatcatcgtcatcagagaagtcagcggtgatgtcatcgttatcatcatcatcgtcgctgtcgtcatcgccgaattcggctagctgaccttcgataccatctggcaacccatcatctgggtcgtcatcactgtcatcgtctgtgtcagtcgtcttcccgaccttgtcgtggaagcctgagtcatcgtcatcgaaatcatcgtcgtcatcgctatctgcgtcgagatcctcatcttcaggatcatcatcgttatagtcgatcacgtcatcatcatcggcaacgtctgctaagaaggcattgaccttcttacgcttcttacgacgtggtgcctcttcttcatcttccggatggttaacttcttcatcaacggaatcgtatggataccaagcgcgcaggccccaaacgttatcgcctaaagaaatgaaactgccatccacgttcagatccgtgtagaattgcggtaaacgttcacgaatttcttcgtcacgcttaccaagataattctggatctcgttggccagatcaacgaacgccatggtatcccctttttctttgaggatctcatgggctacttcgatcattgataattctgatttatcggcattggcaaatgctttgagtttcaaccgatacacgccctttccacagtttatacagtctgtttttcatcatacacgctcaggcgttgaattgcaatctcaatcgataatcacccaagtgctggttattagcaaaaagttgatattcaatgtagacttcacctgccacaggttcagttgtcatgcgaacgtcaatccgtggcgtgaccgtttcaaccggaatgataccgtacggtgtgcgatagcgcgtcagcacgcgcttttcattggcaaaaaacagtttcagctgagtgtcgccgttgctgctgccacgcgacaactgaacatcgccatcttcacgcagcttcatcgtcaccggcatactggtcccagcatcttcgtcaacttcttggtaacgaatgtataaagcgtttcccatctgcaccaacgttccaggttcgtcaaaaacatgtgtctcattgtcctcaccctgcgtcacaaacgtctcaaggtgaatttgaatcggcactccttgtgaaagatccataatgtcaatcctttctaacagctattgtacgcccacgggtcaaactggtcgagtcgtaacaattatccatgtttcaaatcacttactgcaagatatgcaatgaaaatgcagttccaactgacgtggcttgttaccttagttataatataagtaatctatcatatagaaagaaggcgcgtgatggacttgacaacactggccggccagcaggcagcaatttttcagcaaaattttacaaaagacgaggcgccgctcagttttgcccatactaacgcgttattggcacatcctgaattgcacccacctttgatgctgcatttctggacggcagaccaaaccgtcattctaggcatgcaagatctaaaattgccgcaactcggtcacggattgcgagtattggcaagtgatggctatggtttcttcgttcgtaattctggcggtttagcggtcattgcagaccgtggggttttgaatgtatcgctatttttgccaaatgaagacgagctttcaattaacagcgcatacgagctgatgactcagcttttccgcaccgcgtttccgagtctgccaattgcgaccactgaaatcgtccactcttattgtcccggtaaatacgacttaagtgttcgcggacaaaagtttgcgggcatggcccaacgccgtaatcgcgccggcatcgttgtgatgctttattgcagtattttcggtaatcaagacgctcgttgtgccttgcttcggcgattctatcatgaaggcaaggctgctgccagctcacattttaccttccccgtgattcgatccgaaaccatgacgactcttagcgacttgctgggacgaccgttaacgcttgagcaagcaacggtcgccttgctaaatgccttggctgacactggcatcgccgctgatatgaattcaatgccaacccttttgcgcgatccagcttaccataaggcgctgacagaagcgactgccgatttgcacacgcgcaatcgcagcctaaaaaagatgggagaacatgatgctatttgaaaagttacctcgcgaaaaagtctttcgcgatccagttcataattatgtccatgtgcaacatcgcgtcattctggacctgattaataccccagaatttcagcgattacgccgcattaaacagctcggcgtttctgattatgtttttcaaggcgccgaacatactaggtttgcccattcacttggtgtttatgaaattgcccgtgagatgtgtgacaactttgtcaacaactatccgacacaaacacctggcgatggcctatgggatgacgccgaacggccagtcgtgttatgtgccgccttgctgcacgatatcggccatggtgcctattcgcatacatttgagcacattttcgacactgatcacgaggcgattacgcgagcaattctcacggattcgcatacgaacgtgaacaaaattctgcgtggtgtcggtccggaatttcctgagatggtcgcatcggttatcaaccacacctatccgaatccgcaagtcgtgcaaatgatctccagtcagattgatgctgatcggatggattatttgttgcacgatgcttattacaccggcacgaagtatggtctcttcgacctttcgcgaattctgcgagtcatgcgaccatactcggatggcatcgcttatgaagccaacggcatgcatgcggtcgaagattatgttgtcagtcggtttcagatgtaccagcaggtttatttccaccctgtgtctcgtggcatggaagtcattcttttccatctgctaaaacgtgccaaattcctgtatgagtccggtcagtttgaatctggcttttcgccgcggctactcgtgccattttttgaacaaacttttaacctcaccgactatttgaaactcgacgatggcgtgttaaacacttacttcacttactggctagattatccagacagtatcttaagcgattttgctgatcgcttcttgaaccgccgaccactgaagtctgtgacctttactgaccaaacagcctatctcttgccacgcttaagggatttggtagcatcagccggctttgacccgcactactacacagcggaaaatgatagttttgacttaccatatgaccaatacgacccagcttccgcaaatccaaaaacgcaaatcgagatcatgcaaaaagatgggacgcttgaggagctctccaccctatcaccgttagtcgcggcacttagcggtcgggcaaccggtgacaaacggttctactttccaaaagaaatgctagccacgcaagacagtaacctgttttcgccaatttatgaaaagttccagcattatctgctgaatggcggtctcattgatccacactttaacgattgatgactgccttatcgcttaggttgattggctagccatttggcaactgcccaacggtgggtcggtcgtttcagctcagcgatggctaggtcaatcggcattaacatcaaggtattaaaagtttccagcggatcttgtacaaacgccaattgatcacaagcaaaaaaagttgccggatgataataagctgtttgacggtgatgagagtaaaaatattcagatgacttgcccaacttttgggtgacatgaacggttgcgccaaattcttctaacagttcgcgtgccaacgtgacttctggcgtttcgccttcctcgacgccgccgcccggcaagaataaggcgtgattgggcgcctgcagaatcagcaaccgagcgccactatgatccggtatgacgccatatgcgccaatccgggtatgataatctaactttggatcttttcggccaaacacaggatcgatcatgttgattacctccgcttttaatcacattataccctaatcattttttaacctctacacaaggagactttccaatgtcagctcaggaactttttattgtttttgcgataccgatcgtattaggtgtcatcttcgtttttagtttcaccgtggagccgcgacggttgattaatggtgtcttgtttaatttttttgcggtcacgtttcttgtggcgttagcgattgccattttaaggtcaggcaatttgttgctaatatcggtcaccggcgtattgttcctgatcattattttgatcgttgctttgctctttgcgttgcatttattctggttgttgtggaatgccattctggtttggcggcgtgaaggtcattcattgagcaatatgctgactttatatattgcaattggtttgttgctgatcgaaattgctgcttcttttggtcgccggttcattcctgatccgttgtacttctctcttgcaatcttttttggtctcggcggcttttatgtgctcttaacgttgtataattttcttacagttttgattctgtataactttcgtccgcaaccgcacaatcgtacatttctcattgtgctgggcgccggtttgttacatggcgaccaagtttcaccgttgctagcgagccgaatcgatgctgcgatcaagttctatcgcaaacaaatcaaaaagggccgaccagcgccgcgaattattttttctggcggtaaggggagcgatgaggccatctcagaagcgatggccatgcaacgatacgctttagggaaaggcatccctgaaggtgacacgcttcttgaggatcagtcaaccaccacattggaaaatatgcaattttccaaacgtctcattactcaagaaattggtgaatcaccttataaggctagctttttcacaaataattaccatttgtttcgtgcaggcatctttgcccgcatggctggcattgccgccaatggtgtcggcggcgcgacttcgttctacttcctacccaatgcggtgattcgcgaatacctcgccttagtggttctatataagcgacggcatgctgtcgcatttggcctcattgtcttgattgcgattgctgaattcttacgggtttggcatctgggataagccgcagagatgcagcataagtgttgatttcagtatactaattttgaagggagttactgtttatgttaaaagaatttcagaaatttattatgcgaggtaacgtgctagacttagccgttggggtcatcatcggcagtgccttcactggtttagtcacctctttaactaaaaaccttatcaacccgattttatccatgtttgcgggcaaagctgacctcagcgggctttatttcacgatattgggcgccaagtttacatatgggaattttatcaatgacgtgctcaacttcttgattattgcttttgtagtctttctgctagtcaaaggtattaaccgcattttaccgtcaaaaccggccaaaccagctggtccgacacaagaagaattgctaacagaaattcgcgatctgttaaagcaagatcaacaggtctaataacctaaaataatcatcttgtacaacgctttatcccataaatataaaaagtggcctcgttgcagtatttacgcggggccactttttatatgaataattgaatattaacgcttgtttgacaacttggttctttaccaaaagcttagtagccgtatatcaatactgccgcttaccgccttgatagacttgtttatctttttgttgaaaagccttcacatcagccatcggatctttttccaaaaccaaaaagtcagcgaacttgccttgctcaagggtaccgtattgatctgcaattcccatcaacttggcgccattaacagaagtcgaaaaagcttcaaacggggtcataccttgttcaaccattaattcaagttcaacaggcgacatcgtaaaatcattgaaaggtgtgccagcatctgttcccagtgttaaaggaacaccacggcggaaagcattcatgatgttcttgtaaagatcatccaaagcgtcagcagcctttttgacttcccaatcaggaatctttcctttggcgaaagtaggaatcgcccagtcggccaccaacgtgggagttaaataagtcccttgtttcaacatgaggtcaatttcatcatctgtcacataaaaaccgtgttcgattgaatcaacccctgcttgaatcgcattcataatgccaggatttccttcagcatgtgccgcgacaatgtgtcccttatgatgagcttcctcaactgcgacatgcatttcagccacacttagctgtggatcatccatgaagtcatttggggtcatgaccccaccagtggcaattactttaattgcctttgcacctttcttcaaggctatgcgaacggcctttcgcatctcatctggcgagtcaaccacatacgccgcatttggcatatcaccatgaccgccagtcatagaaaaacatttgcccgatggcatcatttcaggcacctgggttaactgaccttgatctcgcatcgcttttagcgcgatatcgatatcccaactactgccacattcacgaatgtatgtaaccccagattttaataagtcatgcagatgttcgacggctcctacggtagaggcaacaacgcctctgctggtaccaccatccccagttgtggggtcaagcgtgatgtgcgtatggacattggttaatcccggtgtcacgtactggcccccaagatcgaccatttcagttgcagatggtgcttggccagtgcctgtttgtgcaaccttgccgtcgtcatcgacagcaaaccaagcgtcttgaacgactttttcagaagtaccggtaaataaggaacaatgagtaaaaacagttgacatgatactgcctccattcttttctgcctattggctaatgcactaactttgatattgggctttaatattgcttgcgtttcacctagttcacactcggtcttgcatatgcgtttagtaactgaattaaataatcgaccccttgctggtaatcatgcaatcgaatgttttcattaggcgcatgcggacctgagccagcatagttcaccccaatcaagataaccggtaagttcagggcatcaacaaaatgtttggccggtccgcctcctggcatcattggcacaaaacgtacttgtccagtcccgtaaacttcttcagccacacttttagctaacttcagatgagggtcattcaaatcagagtgaaaggcatcttcgccaagattgtaatgtaaatgaacgtcagaataaccattcttatctaattgtgcctgaattaggcttgcaattcggcgaggatcttgccccgggagcaaccggcagtcaagcttcgccaatgcctcttttggaataattgttttaagtccttcgccttcgtaaccagctgataagccattgatcgtcagtgtcggcgccgtcactacagccctctttggatcggcacttgtaaacggtcgcttgagtccatacgttttacgaatcgcatctgcatcaaagtccatttcatcgattgctgcctgtgatgccatatctaatggctcgatatcatcataaaaaccatcgataagaatatgattttgttcgtccgtcaaagaggataatgctcgaactaaacgccaagcggcattgtcgatgtaggctgctaacgatgagtgaatatcagcatcggcggtcttaacatgaagatcaaatgaaacgatcccctttagtccagcaattacttgaaaatgatctgcctcattcttgccacccgtttcccaaatacatgcatcggctgtcagttcatcacggtgggctttgacatactcccctacatgtggactgcccacttcctcaccaccttcgacaaagaatttcatgttgaccggaaaaccgctgtaaaagcgtcaacattattttgccattttagtcacatgataaagaatgaccgaatccttaatttaaaaaggattgatagcaagctgtataggtttaatgagaattttgtacaattatttgttgacagtcaagcaaataaggttaaagtaatctccatattataatctttttttaatttatttttgaatggaggatacatatgaatttcttaattgcgtttgctgttgtcatgatctttatgacactcggcgaatgggttgctaccgccaccaaagcctttattccttccgtgttcattacggcagttctattcgtcattgggttctggacagtcttgccaaaaaacgttgttgagaatgcctcgtttggtccaggattcattaccatctgcatcgcgcttttgttagttcacctcggaacgctaatgaatctgcgcgaactacttgcacagtggaaagctgtttgtattgccctgctcggcgtttgtggcaccttgctgttgacattaacggttgggacactcatctttgattggaaaacagtggtcgctgccgtcccgccgctaacaggcggacttatttctgccctactcatgtctaacggcctcaaagcgcaaggcttagcatcactagtagccttacctgtcgcgatgtttgttatccattctgttgttggttatccgctaacctcagttttgttgaagcaagaaagccgccgcttgctgagtcatttccgtgcaaatggcagcaaattggatccgaacgttcccaagatgcgccgtggagctgaagaagtgaaagacaatcgccctaagctgctgaacttgcctgaaaagtatcaaacgagtgcttttatcatggcccgcgtcgcaattgtcggtttgcttgcaatggggtttgggacattgacaaacaatgtcatcaattctaacgtggtttgtttgatcttcggggttatcgcgcatcaaatcggttttcttgaggacaatgctttgaacaaggctggcgtctttaactggttgatgtacggcttgctcgcctatgtctttggtcaactgagtgccaccacgccagctgtgcttggtggtattgtcctccaaatcattgtcctaattgccttgggcgttctgggcatgttcttagcatcgaggctacttgctaaaccattcggtatgtcttggcaaatggcattttcttgctcactgacagctctttttggcttcccagcggactacatcctgacttcggaagtggcgcgagcgatggcaacaaccgaagatgaagaggaatacttaacccaacaaatgatgccgaagatgctggttggcggatttgccacagtttccgtcgcctcagtcatcatcgccaccatcttcttaaaattgctctgataaattggcacagtatttacaccggtagcttgaaaaaatgacagtcattggtgacttctaagaaagcattcaaaagtctggtttattgatcatcaacgcacatgaaaagcgacagtcatctaatctatttcagatgatgactgtcgcttttgtcgttgtcattaaaatgctggttgtaaatgaatggccaaaacaccaaagcttgcttcctgccatactgtgtatagctgatacgtatctgcaaccattttcgtttcggaatccgttggtgcactgcctacctgcggaccacgatatttgtgatacaactcagcaaaactggtgaatttttccagtgcacttactgtcctgcgctgtgtttgtgccgttgtggtgtcttcaaacacaatcgtatcgccaacttttaattgttgccgtttttcatcattgagtctgatctcaatcgttttgctgccttgtttgactaacaaaaactgatcgtgagctaatcccattcgcatctgccggttgtgcccccttttcagctaatctcagtggctgttaatctaatgacgctttgtttgatgcaagtagttggttactgtctcggcaaacaaaactaacggtggatccagcagtagaacggaatagaaaaaggtcaccaacatcaccaatcaagcatttacacgatagtcgctatgctacttttcacattatatgactttcttgcgactatatgtcgtttatttgcttcaacaccaatgatgcaggtaaataaaaaagccgtacctgaatataggtgcagcttttttagtactatttcgtaaaccgattttcaaacaacggtgtcacggaacgattttcctgaatccgcatgatggcgcgacccatcagcggaccaactgaaaccacatccagtttatccatatgcttgtcagctggaagattaatggagtcagtcacaacaaccttttcaatagctgagtgggtcaagcgttcaactgccggaccagagaagatggcatgggtcgcggccacgagcacttcggtcgcaccggcatccttcaatgcttgagcagcgagcgtaatggtgcccgcagtgtcgatcatgtcatcaatgatgatacattgtttgccagtaacattaccaacaatattcatcacttccgcaacattcggacgcggacggcgcttgtcaatgatcgcaatcggtgccttcaagaattctgctagttttcgggcacgggtaacaccgccatggtcaggtgacacgacaacggtgtcggcaccatcgtagtgattccgtaagaagtaatctgccaacaatggggcgccgacaagatggtcaaccggaatatcgaaaaatccttgaatctgcgcggcatgcaggtccagcgccaaaacacgtgtggcgccggcacgttctaacatgttggcaacaagcttggctgtgatcggttcccgtgaacgggctttccgatcttgacgggcataaccgtaataaggcataaccacgttgatcgtatgcgcagaagcgcggcgcaaagcatcgatcataatcaacagttccatcaagttgtcgttaaccgggctggaagtggattggatgagataaacatcatccccacgaatactttcttcgatgttgatttgaatttcaccatcgctgaaccgcttaaccgacgactttcctagtttcacaccgacctcggcagcgattttctctgccaacggcttgttcgaattcaaagcaaaaatctttaatctcgggtcaccgtattgctcagacatatgttcctccacgaattgttatgggctgcgaaaaattgttccacagaaatcttagcggactgacgaaaaaaagcaagcacatgaatagaattataacctaattccaatctggatcttttgccagcggcaggcgtttccaaaaatcatctttgttggtttgtcgtgcgcgggcgatggccatcgcgtgaaacgggacatcttttgtgatcgttgaaccagcagcaataaagctatggtcagcaacatccactggcgccacaatattggaatttgaaccgataaaggcatgatcgccaatcttgctttcccacttctgaacgccatcatagttgacgaaaacaacgccgcaaccaacattaatatccgttcccagggtcgcattgccaacatacgttaaatgaccaactttggtgcgggcaccgatcttggcttttttaatttcgacaaaattgcctagatggacgtattcgccgatgtcagcatcaggccgcagatgcgaatttggaccaatgtcactatgagcgtgcatcacggcacgctcgatggttgaactagttactgtgacatcattttccagtgtggcatcgactagttcagagtgggtaccaatatggcaatcttcgccaatgactgttttccccttcaagtaaacaccgggttcaatcacggtatcggcaccgattttgacctcggtatcgatataagtcgttgctgggtcaattaaggtcacaccattgcgcatatgctgttcattaatgcgctgctgcatcaggcgggttgcccgcgccaatgcgacccgatcattgacgcccaatgattcggtataatctggcatctgataggcagccactttttcgccagcgtcgcgcaaaatacctagtacatctggcaaataatactcgccttgggcattattattattcacttgatgcaacgccttgaacagagcctggttgtcaaagacatagacgccggtattgatttcagaaatcaatgcttcttccggcgttgcatctttttgttctacattcttcacgacattgccgtctgagtcgcgaataatgcggccgtaaccggttggatcaggagcactggcagtcaaaatagtcgcctttgcgcctttggcttcgtgataagcaaataaatcattcaacgttttggcggtaaacaatggcgtatcaccactgataatgagggttgcgccttctttttgaccaagtaacggttcagcttgtaaaacggcatgtccagttcccaactgttcagattgcaaaacaaacttcgtgcgcttgcctagcgtttcttcaactgcttctgcgccatggccaacaattgttacaatggcatcgggatggatggcttccacctgactcaccacatgctcgaccatacttttgccacagaccggctgtaaaaccttgtaatactttgatttcatccgcgtccctttaccggccgcaagaataatggtgaatttctttgacatgtttatgctccaatcctaatattctgtcttcatgatagcccagccacgggaagctgacaacaagtgggtggcttgtgtctgtggctgtccacaacaacagacccatgttgccacgggtctgttgttgacaatgattggcttatgacttttgtatgtcatcgtcattggctgaatcctgcctagcaacaggatcttttggttgtgactggaaggtgctaatttgggtggtatcggtccatgcatcgtaaaagaaacggtgatgacgcgaaatgatttcccatgcaaaattgatgagaaagagtagcgacaagaggccaaagaatcccagcgccgctaaattgatttcggttcgatggaaggcgccgaaatactcgccaaaaaattaattcaatcccataaagctcggtaaagccagcccgtaaagcagactctcacgtaaaaagagacgccagaacccaatcggctggccatttgtccgaactattttgattcgtacaagactttttcccagtgtctgcccttgattaaatgctggccaaagaacaaagacaaagaatagcggcaggacataattgccgagaaaacctggtagctggtccagtcccagcaaatgcagcaagatttgaattaacacgccaataatcccactgaagagaaagaaatcaatgataaacgcggcaaatcggcgagccaaagtcacccgagcaccgcgcgcctgacttttcgcatcaatgatgtcccgtgacggcaacgcgcgcatcagaattggtgcaaacacaccgcccaaaaagccgcctgtcgtattcaaaatcaggtcatcaacgtcaaaaagtcgatacggacgcggataataaccgtagagtcctgacaattgcgtcagttcgaagaataaacttaagccaaaactcatcaaaataatctgcggcacgctgcgtttgaagtaataacgcaagtaaaagccaaacggaatcgtcaaaacgacgttaaagaacggctgaatgaaagcggattgctttaacgctgccaaccaagtgtgcggattggttggcacgaacacggttgtatgcacgaaataacgcaacgccatgaagggttccagattatatttaggcccggtgaactgcgcaactgctgctcgcgaaggcaacggcaaaataatcaaaaaataggctgatagcagataaaagacgaacgagtagatcacgactgcacgccaccagctaaaggcaccgtaccgtcgataaacgacgaccagaaatggtaatgccaacaccagcgctaaaaacggaaacgtgatgatcgcagttctgaccggtccgagataagcactcattgaccagccacctcgagtagttgacgattctgatctagaaaattgccagctgtggcatgaagcgtattggctttagtgtccaccttgtcaacccgaatcaatgatgtatattcactgaccatccgatcaccgtcgaacttaccttcagcgaaaaccgtgataccgaccatcttggcattgaattcatcaatcagagccttcatgccattgacggtgccgccgcctttcatgaagtcgtccacaatcagaactcttgagttagctggcaagctgcgtttactcagttccatcttttcaattcgcgcagatgaaccggacacatagttcacggacactgtggaaccttccgtaatcttggagtcgcggcgcacaatcacaaacggcacattcagatactgactaacactttgcgcaattggaatacctttggttgcaaccgtcatgacagcatcaacatgggcctcgcgatattgggtggcaattaatcgcccaatttgccgtagcacactaggtgttcctaacagatcggaaagataaacgtagccgcctggcaataagcgatctgtctcggataaacgtttggacatagcggcaataaagttttccgcctcatcttctcccatgatcggaatatagcgcacaccgcctgctgcgcctggcaccgtttcaagaatgcccgtctgtcgctgggcaaatgttcgccggacaatagccagatcttcactgatagaagacttcgcactctcataccgttttgagaaaaaagtcagtggaatcaaggtatgcggtcgttctaataaataccgggtcatatcaattaaccggtcacttcgtcttactttcatcatttcgctcctaacaccgaatatttagcactacactaacattgcgtgataatctcaacaagtataaacgttttaaccgaaaatttcgacccttttgcgttgttttttcaacgaacgttcgcatttgctcatcttgtgtttctttttaacgggaaaattgctacgtctgattggcttcttacgccattctatattagaatgattataaagaggaaaaatgaggagggcaaaccatgaattgttttgaactgagtcatgtgacgtttgcgccggaaaaaaatgcgatcctgcatgacgtcaatctgacgattccgtggggtgcagatcttaccattgccggtcattcgggttcaggaaaaagcaccttgcttcgtctgctggcgacgctgctaacaccaacgagcggaaccattcgctataatggcaaaccgcaggacgattatgatccgatcagttatcgccgcgaagtttcttattgtgcgcagcagcccgcgttgtttcatggcaccgttgctgatgatctgcagtttccattcaccattcgtcatcaaaaaatgccccgtgaagaagccgagcgtgctttagaaagtgttgatttagccaaaaccatgctcgacgatccggtcaaaaacctttccggcggcgaacgtcagcgagtggcgttgttgcggcatcttttctttccgccaaaagtgctgttacttgacgaagtgactgctgggttagatcctgacaccaaaacggtcattcatgccttattacaaaaacaaaatgaccaaggcatcaccttgatccgcgtcacccatgatgaaggcgagattcaagccgcgaaacaattgctgcggctagttgccggacaattcgaggaggccgctcatgagtaatcagctcattgtgtcacccatcaccttattgctagcacttatcttggtcttgattgcactagcgatcaacctaaaagaagatctcggcatgaccaaagatttgattatcggcgttgtgcgggctgtcatccagttgactgttgttggtttcgtcctgacctacatcatcaaagccgatactgtctggctgacgttggccatgattgcggtcatcatttttaacgccgcttggaacgctaaaaaaagcgccgggacaattccaaatgcgctcgtgacgagtttgttggcgatcaccaccgcgactgggttaacgctggtgatgctggtcgcggtcaaagccatccgttttgtcccgtcacaaatcgtcccaatttgcggcatgatcgccagcaacgttatggtggcaattggcttggcttatcgcagtttgaatacagaattcaatgatttacggcaacaggtccttgaacgtttggcactcggcgctgatctcaagcaagccagtcaatcgctcattgtcaatgcaattaaaactgggatggcgccgacgattgattcagcaaaaacggtagggttggtcagcttgccggggatgatgtcggggttgattttcgcgggtattgatcccaccaaagccatcatgtatcagatcatggtcacctttatgttactgggcgccaccagtatcggtagctttattgccgtttaccgcagctatccacgcttttacaatgcccgtaaacaactgcgctaaaaaatcgtccaacgaatcatttgacaaccacataaaaaacgttgtgctcgcattggccatgcggacacaacgttttttaaattacttgattaataagggttctccattttattttgcggctcgtatggaccatactcaacctgaatcgtcgtgtgcgcaatatcaaagctttcgcgcaaagataggctgagcgcatcgaggaagtcgtcattgccaactgtggtcgtgcgcacgacatggacggtcagcgccacatcggtcgtgctcaatgcccaaatatgcaggtcgtggcaagaagcaacggttgggtaagcattcacgagctttttaaccgccactgggtcaatatcttttggcactgctgccatggcaaggttgaccgcatcgcgcagcaaattccaggtgccaaccaaaacgacaatggcaactaagatcgacatcacgggatcaagccattcccagccagtcagcaaaatcagtccgccggcaagaacaacgccaagcgaaacgccagcatcggcggccatatgcatgaaagcgccgcgaatattcaagtcatgttgcgaaccgccatggaatagcaaggcggtggcgccgttgacaataatcccaacgcccgccaccagcatcatccagccgccttcaacaggtgcattttgtgagagtcgggtgaccgcctcaacaatgatggcacccatggccactaataagaacgcggcattagccaaagctgccaaaatcgaagaactcttataaccataagtccgttcgacagtgggatgccgtcctgacagccaatctgcgaaccacgctaatccgagtcccaacacatcgcctaagttgtgaaccgcatctgcgaccaaggccaccgatccaatgccgatgccaaaggctacttcagcaataatataaattgtattcagtaaaatgccccagaagaatgccttgtttggttgaacttgttccatgacaaccgcccctccattttcctatccccatcatggtttagcgttacctaaaaatcaacccctaaaccgtggacccgtggcggataagcaaaatggccgtaataggtaaacttcgcggcaaaagcccttcatgctgttataaacccgcatggctctggagtgcttttggcacagaccaaaaacagttgggccgctgcctgacatttgcgcgaattcggcaccatacttttgtagccgctgcttgagggcggtcatttccggataccgactagcagtgatggcttcaaggctattcgccatgccactcgtcatttgtgcaaagtcatgattttgaatgcctgccaccaccgtttgcgtatcaggatggcgcagaccggcgtcataatcaatggcattcaaaatggtcggcgtcgatactgaaacgcgaggctttgccaaaacgacccaaaaattcggcaagctgccaagtggggtgaccacatcaccgcgaccagttacgagagccgtctctgaatatacacagtaagggacatcactatcaacacttaagccgatccgtgctaattgtgaccgactataaccgagttgccaaagcgaattcaaccctcgcaaaacggcagctgcatcacttgagccgccgccaagtcccgcggcgaccggaatatgtttttcaatatgaatccgcgcaccttgacggatattggcgtgacgctgcagcgccaacgctgctttgtaggccagattgcgcggatcttcaggtaggaagccgctatctgtcgaaacctgaatgctgcgatgcgggctaatcatcacatagtcagctaaatcgaccgatgtcatgaccatctgccactcatgttcgccgtcgtcatggcgatacaaggcatccaagctgagattaatcttggccggtgctttttcgatcagttccatccaaccaccagtctctggcgacccatacgcttgccggtcaatcactatcaccgcaagccccgttgtatgcatcgaccgtatagttatttttagtatactgttttatgcgctgattttcaccgatacacggtaaaaatcgcgtaacgatgcgttacttgctgtttccgtatccgaaatgaaaaacagcaaaagacctcgatgcaactcacatcgaggtcttcttataacagatttaattgttaaaacaattcaatgttatgaggctttttcttcgccttcgaaggtgatctgaattgacttagtcaagagatccgcgtaactgtaggagacgcgctcgaacgcattttcatcttggtcgagatcgaccacaaaaatagccggataggtttctttcaaagtcccccgtcgccgcgtcactttcttgcgtccagcttgtgcaacgaccgttaagttctcaccgatttttccatcgagcttccgtttgatgcttgctagtgtgattggcatgcacttcacctcttgcagtctatcatagcacgaaagcaagaaatttgcaattataccacgcgtttcttatttcggcaagcgatttatgctggtgtttttagtaaaaatttatcgtgcttaagcgtgagcctgactgattaaatccgccgctcgcaaagcacgatctaaccgagcaaaatcagcaattgaaagccgctctgcgcgggtaccagggtcgatggcggcggttgttaaagcagatcgaatggcagccttgttagttttgccaaataagaccacaagattattccagagtgtttttcgccgtgaagcaaaagcgccgcgaactagccgatcaaaactggctggatcggttaaagctgcaagcggttcggtgcgctgcgtcaaggtgacaatggctgaatcgacattgggtgccggtacgaaggcatggcggcttaccgtgaaagcagttgccacgctcgcaacgagttgaactgcaatactcaggctaccatattcttttgaccccggcgttgcgcttaatcgttctgccacttctttttgcatcataaccgtcatgctatgaagtggtagctgtgcgcgtaaaagatggagcaaaatgggtgtggtgatgtaatacggcagattggcaacaacctttaaggtgtgcttgccatcaaaatgctcggcaaccaatgcgcctaggtcggtttttaaaacatcctcattcacgaccatcgcattaggataatcggccaatgtttcatccagaatcggcagcaaccgatcatcaatttcaagtgccaccacctgatgcgcgctgtccgctaagaattgggtcaaagcaccaatccctgggccgatttcgatcacatcatcctcaggggtcaaatcggcggctgtcacaattttttgcaaaatcttggagtcggtcaaaaaattctgacctaagcctttgcgcatatggaaaccatggcgctttaaaatagcgttggtgaccgctggctgcgcaactttttcaggttttgtcatgctgtcctccatctacttgggccatggcagccaaaaaagctgcgcggctaatttgaaactctgcgagtcgtcgaagcaactgtttgctgtttgtgtagccaatatgcaacaactcgcctaactgttcccgacgttggcgggcaccgacaccaccgactaaatcagcagcgagcaaatcttgctgactaatcacttgcggtgcatctggcatttctgtaaaaagatgctgcaaagctgcgcgcaacgcggcaggcttggcatgttcgatgcccaacgagcctttatgatccggcacaccttcacgacgcggcaagaaagcatgcgtcacccctggaaccgcgcgggaaatcgttttgcggattttctcacctgggaaatcagggtcggtcagcacaatcacaccgcgtttagcctgtgcttgccgaatacgttcgagcgttgcctcgtcaattgcactgccgcgggtttcaatggtgtcaatggcaccaaaagtttctttcaatcttttcgtatcatcgcggccttcaacgaccacgacttgtttgatagttgtcatgctttttcctttaatccaaagatgcgatgggcattgtcccatgtttgcttggcaatcacttccggcgtcgtttcacgtaatttcgccaaggcctccaccacataccgcgtgtagcccggttgattctgccggccacgatagggtgtcggcgtgagataaggcgcatccgtttccactaacagtcgatcattgggcacaattttggcactggcatgttcttccggtgcatttttaaagctgacaatgccagagtatgaaatgtataagcccagatccagaaaacgttggccccaagttgcatcgccggtgaagctatgcatgatcgcgccgaagtcttcaacatgagccttttttaagatgtcataggtatcgtcaaaggcatcgcgactgtgaattgacaccggtattttcaacgaacgtgcaatctcaagttgccgacgaaaaacccgtcgctgaatttcccgtggcgaggtatcccagtgataatctaagccgatttcgcctaaggctacaactttagaatccgccagttgcttgattagcaatgcctctttggccgcgtcataatccttgctagactcggggtgccaaccaacaatggcatataaattgtcatactggtgggccaacgccaatgcgctggcattcaaagctgtgtcagagccgacaatcgccatcttcttgacaccaagttgccgagcgttttcgatatactcggcttctttgccttgatagggcgtgtcattcaaatgggtgtgtgaatcaaaaatatccatgcgatctcaactttcttttatgcttctgtcataagcggtgtcagcaaccgtgcaacttgagcggcttttttggcagcaaatagtcgcttcaattgcgcagctggcgattgcgttaaagcgcgaatcaactgtgccatgcgttccggttgtttctgcggctcagcattcatgagcatgaacacccagttcactggtaaaatccgactagcatcggctaaatctttgaaggcgaccggaatagcaaaatgaacaaccaccaaccgcgtttgtttcactaattcgccttccaaatgcggaatggcaatattcggcaagccatctgccacttcatttagttgcatgccagaaggaaatgtctgctcgcgtgtgatcaacgcttctttcccagccggcgccataacctgctgttcaataagtgttgtgctaatcgttttaaaaaaagctgcttgcgtgggtgtattcagaaaatagaccagctctggcgtgatcaaatcagtcatgcatttcacctatctttacaaattctcaatatgtttagagtatagcacgcagtttgcctaggctcatcgtcgggtgatcatttcaagaaaccatttattatccgcgctttttctttgattttcatgaaaatgctccgcgaaaaatgtctattacttctattttgttctatactatggaggtactgaacatttaaggattacctaggaggtatttttacatgtctgttaaacttactgctggtcagttgaagcacttgaagcaattgtcaaacgatgacaatgtgatctcagctttggccattgaccaacgcggttccctgaagaagatgcttgcagctgcagctaacaagccggctgatgaaaccacgattgttgatttcaagaaggcagtctctgaagaattaaccaaatacgccagcgctattctgcttgacccagaatatggcttgccggctgctaaggttcgcgatcctaagtctggcctactcctttcatatgaaaagactggttacgatgctaccgaacctggccgtttcccagatctgatcgacaaccaaagtgctttgcgcattaagaacgaaggcggcgacgctgttaagttcttgctctacatcgatccggatgaaccagacgctatcaatgatcgcaagtatgctttcgttgaacgtgttggtgctgaagcaaaggctaatgacctgccactgttccttgaattggtttcttacgatggtaagaccaacgaaactggtacagctgcatgggctaaagctaagcctgaaaaggtcatcaagatcaccaaggaattcagcaagccgcaatacaatgtttctgttttgaagcttgaagttccagttgatcaaaagtttgttgaaggctacaccgatgacggcgttacccctgtttatagcaaggaagaagccgctaagtattacaaggaacagtcagatgcaacggatctcccattcatcttcctgtccgctggtgtcaccaacgaattgttccttgaagaactcaagtttgctaagcaagcaggttcagcctttaatggtgttctctgtggccgtgcaacttggaagccgggtgttaagccatatgctgctgaaggcgaagctgctggtaagaagtggctgcagaccgaaggcaaggctaacattgatcgtttgaacaaggtgcttgcagaaactgcaaccccttggactgacaaagttgaaggttaatctttaaccatagttgcaagaaaggaccgatcatgatgatcggttctttttttatgactgcggacatgtttttgtgaccactgcaaacatcaaaatgaagttcgaaaaacttgctaacaatcattacaggttggtgatccagtggtagactggtattgaatgcgttttcgtctattaggaggtaattcaacttgatcacaattgaaaacagcaaatttaaagcaggcattgccgagcgcggtgctgaattgcagtcgttggtaaacaaagccgacaactatgagtatgtctggacaggtgacaagactttttggaatcggcatgcgcctattctgttcccatctatcgggaagtctaatcaggatcaatatcggttaggcgcaaaaacctatccaatgagtcagcatggatttgctcgtgactatgactttgatgtcagcgataagagcgactcagcggtcaccttcacgcaacatcaaaatgctgagacattgaagaagttcccgtttgagtataccttggctgtcacttacatgttgacggacggcggcctcagcgtacattacacggtcacaaatgacgataataaatcaatgccgtttgctttagggttccaccctgcctttaatgttggcttgaaagctgatggcagtttcgacgattacgacttcactgttgaaccattaaacagcccactacaacgattcggcatcggccctgtgccattccgcaatggcgatgttgaggacatccccggcgcagaaggcaatcgtttgcccctgacacatgatcttcttgatggtggtctcgtgattctcgctaacagcgaaattgccaaggcaaccctcgcatcaccgcaccatgaccacagcatcaccctcgatatcagcgacttcccatatctcaccatctggagcccagaacataaaaaggcacctttcatcgccgttgagccattcgatggtctgccagatcaagctggcgaaccaaccgactggtacaccaagctcggcaacaccacgctatctgctggtgccaacaagcaattggccttgaaggttgagcttcactaatcgaagtttaccacccaatcgtccgacacaattcgggcgatttttttgtgagcgcggggcagctcggtagcaaccgaagtgtcagcagtcaaaaaaaactgactcaccctggctagctttctggaaaagcgaccaaatgattggtacagttgcagtacaatgaactaaattcagaaaaggagacctctatccatgcacattgccatcattgacgatcaggcagccacgcgacaagcaacaacccagctgcttagccaactgaccacgcccacgcaacctttacaagtgacggcttatccaactgcagaggcctttctttttgctgatcagcctgccgatctgttgttgcttgatatcaagttaggctcgggcatggatgggatgacgcttgcaaagcagattcgggaacatgacgcggacacggcgattgcgtttgtcagtaactatgatgaattcgtttttgacggctatgatgtcaacgcgattgattatgtcatcaagccgctcacaagtgacaagctgcagcatctcatcaccaaagtcgccgcgcaaacgcaaccaaagctgttggccttcaccaccgccaacggcattcagcgtgtcgccatgtatgatatcagtgccatcgaagtaaccgatcatcgcttgcaggtgcacacccagaaaatgacgtacacagttgccggtcagttaaaagacttcctgcctcagctcgatgataattttattcaaatctatcgatcaattgtcatcaacctcaattttttgtcgcaacttgagaaaaacaccgtcgtcatggctgatggcaccagttacccggtttcacgacaacaagcgcctcttgtcaaacaggccttctttaaacattttcgggggttggctcatgacagtgaatgaatggtggtggttagccgcattcggtctgttgacagttggctgttgcctgcttctatggtggaccttccgccgacaacaaaattggcctgtgcgcggtttgaatctggctgtcacattgctggtcttaggtggttggtggctttggccgctgccaagtgtgcggtttgtgcttttctgcagcaccgttttgaccggcaccttggagtttgtcttaatgcgtcaattcctcaacgatcaggacgccgtattcgcccgcagcctcgataaaatgatggcccaatattcgcaagaagtgcaggaactttatgccaatatgcgcggatggcgccatgattaccatgatcatctgcaggcgctcaaagcctacttagataatcaggatacgcaggcagcccgcgcctatctcgacgaactagaagacaaactggacgaagttgatccgctcgttcactctggcaatgccatgttggacgctatcgtcaatgctaagctgacattggccgaacggttgcacatccccgtcaatgaaaaagtgattgtcggcagcactccgttaattaaagatgtcgatttggttgtcatcttaggaaacctattagataacgccatcgaagcgatcagtgagcaaccggccggtgagccgcgccaactgcggttgtatatcggcatcgtcaagcaacagttttacatctccgttaccaacacccggcctgccgatcaagaaaacgattatcagtacgcctcaaccaaaagtgacaaacgcggcctcggtatccggcgcgtcaacaaactcgtggccaagtataatggcatgatcaatcgccaatatgaagcttccgtctttgtcaccgagattgcgattcccattcacgccgttaaatcgaccactcacgcataatctgccgcgagtggccgattttttgctagattaagatcaacgaggtgatcgacatgaaaaaatacgggttgttcaacaacttaaggtggtacttaacttacttgcgaaaagatgaaccgtcacttgcttggaccgcaaccggtctcgccattgataaagcggctgcagccttgctgggagttttcactccagcattgttggtcggtgccattgtgcagcatgcgacattgggggaatttgcttggttagctggtttaaccggcttgggattagccattaccagtgaagttgattatcttttaatgacccacgataacgttaaaagcaccaaattacgtaccgtcattgagatggactttcatcagaaacaatgggatctggattatgaccaaatcagcagcggcaaagttcaagggttggcgcacaccgctttcagtaaagggttgagttggacatatgctggggcagaggcaatctatatttatggtcgtggcactttgattgatatcgcgaccttgttcgttttcctggcaacgttatcgacagtcatgccatgggtctttgtattagttctactcagtgccgccatcagttacgccgggctaagttggtaccgcaagtggtatcaaaaaaataatgttaactggaacagactgagccgccagcaagcttatatctcccgcaatgcctatgcgcttgaaaacggtaaggatattcggatgtttgggatggctggttggtatcacacccatcttgatcgactcctttcacttcaagatgcttggcatcgccgcaactcattgcggcatttcttaggggcacaggttggtgaacttgccggattatgtcgcgatgccttggtctacgggagtttagttattgccgtcacccaaggcagtctatccattgctcaatttactttgatgtttggcatgacaaacggtttcatcaccctacttgatcagttgttgaaagactttaacggtctgcaaactgctagtatcgatctgcaagaacttcgcgaattcatgacgcttaagccgcgaacaccggctcgcccgctcaccacttccgaacaaacacaactagcgcagcgaccggtcaccattcattttgaccatgtaaccttccgctatcccgaagctaaaaccgcgagtctcaaggatgtcagctttacgttagaagccggccaaaagcttgccatcgtcggcgtcaatggcgcaggtaaatcaactctcgctcgtttgatgatgggcttgttacacccaacaagcggcaccattctgatcaacggcttaaacgccgatctattaccactagcaactctttttcattgttcgcccccgtctttcaggaaaccatcgttctagcattgagcctcgctgacaacgtggcattgacgaatccgccgcaacatcaacgagtcgagtccgcattaaaagacgcgggcttagccgattttgttgcgacgttgccacaaaaagctcacacacctatgacccggtacactcgcgatgatggcatcgaactttcaggcggtcagtcccagaaacttatgttagcgcgcgcactgtataaagatgctcctgtcttggtgttagacgaaccaacagcggctttagatgccatcgccgaaaacgaggtttaccaagagtatgctcaattagcctcggggaaaacttctctgttcatctcgcatcgactcgcctcaacccgtttctgtgacaccattctcttcatggatcacggtcaagtgcttgaatcagggacgcatgaccaattgatcgcaaacaatggtcgttatgcgcaaatgtatcatattcaaagtaaatactatcaacctgaagcaaaggaggttccagccaatgacaacctttaaagacgccgaaaaaaagaagccggcaagtaatacggtagtccgagctttacgtgtggttcgggtcatttatgaactcgactcagccgctctgccagttgaatttatgcgtgccctcacaaccgtgggaatcccttatctcaacattgcctttcttgggctcgtgttgaatcagctacagcaacgggcatcattacaacaagtcatgctattaatcggtatctttttggccgttcgttttttgctacaattgtgcggcggctggtttaacaagcgcgccgaggatcatgaaactgcagttaaacgacggctcgatcgcgctgtgaccgaaaagctattaactgttagatacagcacgctccaagatccagacatgcgcaaggcatatgctggagctcaggctgggcaatccttcagtggtggcttatcgacacttatgaaagaagggttgcaggacttcttttcgcttataatcgctgttggttttgggattgcgacacttgttagcctcatgaaaccaatggcagcctccagtgcgtggctcaatgatgatcgttatcccttgatgattttggctttgttgatcttaccaattgtcgttggcagttggagcattaaacacagtaatcgcattcaacaaggggttattcaaaaaatcattccaagtaatcgaaggttcacctattttttcaatttcactgaaaatatggacaatcatcaggttgtccgcctttaccgtgcaagtgacctcattatgcatcgagaaacaaacagcaccatggcatcacttcaacaaatttgggatggcgactggcaaatggccaaatacggtcactggccaaatctcgctatcgccgttgctgtcatcggtctctatatcttagtcggtgccaaagccctcctcggtagccttgcaatcggcagcgtcatgatcgcagttgggtattttcaacaacttatgaccgcggcctaccaatttcttcagcaagttggcatgtatgtgaatatggttgactacctccaattctatgtcgattttctggccctgcctgatcacgaaaagtccggctcgctgcctgtcgagaagcgcaacgacaacgaatttgccatccagtttcatgatgtgagctttaaatacccaggcagcgatgagtgggcgctgcggcacgtcaatctcacgctgaatattggcgaacgccttgccttggtcggccgaaacggcagtggtaaaacgaccctcatcaaactgcttgtgcgcctgttcaaaccaactgaaggcatgatcacccttaacgatatcgacattcaaaaatacgatgaagacgaatatcgcagcctactgggggttgtttttcaggattttcggcttttcgcttatagcatcgcggaaaatgttgcggcaacgacccagcctgatcgtgaccgcatttggcaagcactaactgttgcggatgtggccgatcgggttaagcgaatgcctgaaacaatcgataccccaattacgactgcgttaagtgacgatggtgtggatgtctctggcggcgaagcccaaaaaatcgccatcgcccgcgcgtggtacaaaaacgcgccgatcatgattctggatgaaccaaccgccgctcttgatcccatctccgagtatgaaatttatcaacggtttgacgagctcattgaagggaaaactgccatctatgtgtcacatcgcatgagctcaacccgtttttcccaacggattgtggtgcttgaccatgggcaactcgtccaagatggtacgcatgccagtctcatggctaaatccggcatttatcgcgatttattcaatgcgcaagcgcaatactatacagaggacagaataaaagctgcacgtaaaaaagtggccacatccgttgcacctgtggcgaattaacaaaaacgttttgggttgacttaccacgaataaactttaccaactgttgcgacattatctctgaccatcaaaaaacactcgaccacaactagtcgagtgtttttcattgcccttcaattaaccaaccaagctgccattctctaagttctcagagacttccagcaaagtgattttcttgccgtctaaactttcagccgacaacaacatgccttcagacatttcgccttttagcttgcgcggcttcaagttgaccacggccataacctttttgcctttcagcttctcatattctgggtaaaattcacgaataccggaaagaatttgccgtgtgccttcatcgcctgcatcgagcgtgaacttcaacaacttatcagcgcctttaaccggttcgacattcaaaatttctgcgacccgaatttcgctcttatcgaattgtttgaactcgatttctgacttccgagttttttcgtcgacggttgcttttgcggtgccgggggtcatcttgctcttgatatatgccacttcttcttccgtatcaagacgcgggaagattggcgtgccttgttcaactactttgacaccagctggcaaagcgccccattggacaagcttgtgatcgtcattttcatgatccaagccaagttggccgaagatttgcaatggtgcatgggtcatcactggttgaatcagtagagcaatcagacgcaggctttcggctaagtgagccatcacagcatcaagctgatcttttttggcaggatctttggccagattccacggttccgtttcgtcaatatacttgttcgcccgggaaacaattttccagacttgatccaaagcatcggagaaacgcaactcgtccatcaatttgtgatattgcgccaaagccgcctgcgccacatcgccaagatcttgatcaaacggcgttacatccggtttaaaggctggcaaaataccgtcttcatacttgttaatcatggcaatggtccgattcaacagattgccgaggtcattggccaagtcgtaattgattcggtcaataaagtcttctggtgtgaaaataccatcattaccaaacggaatggcgcgcatcaagtaataccgcaaggcatccaagccataccgttcaacaatcatgtccggataaatggcattgcctttcgacttactcattttgccatctttcatgactagccagccatgggcgtatattttctttggcaacggcaagccgagtgccattaaaataattggccaatagataatgtggaaacgaacaatctccttaccaatcaattggacgttggctggccagtatttgtcaaacaaagcgtgatcattactgccatagcctagggcggtaatatagttcagcaacgcatcaacccacacgtaaacaacgtgcttcggatcggatggaatctggacaccccaattgaagctcgtccgactcatcgccagatcttccagacccggtttgataaagttattgatcatttcagttttgcgtgaagccggttgaacaaaatccggatgctcgtcataatacttcaacaagcgatcggtgtacttgctcatcttgaagaagtagcttggttcgtgaaccagctgcacttcatgaccagacggcgctttcccgccggtcacgttgccgtcttgatcgcgataaacttccgacagttgagattccgtgaagtattcctcgtcttcaacggagtaccagccagtgtattcgcctaaatagacgtccccttgtttgatgagacgttccacaatcgtttgaacggcttcgacatgttccttgtcagtggtccggataaacttgtcattggtgatttcaagcattttccaaagttgcttgatttgggtcgccatgccatcaacataagcttgtggcgtcacccctaacttatcagccttttgctcgattttcaggccatgttcgtcggtcccagttaggaagaaaacgtcgtagcccatgagccgcttataccgtgcgagcacgtctgctgcaatggtggtgtaggcgttgccgatatgtagtttgccagatgggtaataaattggtgttgttacgtaaaaagttggtttgcttgccatgcaagggcctcccgtacattagttcagaatgagtctagtatagcataggaaacagcggggctgtatagttgcccacagctaatcatttgctgctaaccagtgatccaaaacactgataaattcatcatgttggtcaagcagcgccaaatgccgactgttggcgaagagatgccatttggcgttaggaatatgatcgacaactgttttcgcaataagcggcgtgcagaggtcatcagtcccattggtcaccaaaaccggaacgtgaatgtttttgagctgatcggttacatcgaagtcgctaatcgtcccattttcagtaaattcattggggccttcagcaattaaactggcgcgtttgccgttagttggccggcgtagcggttcaggtgagttttcgtctggatcatcccagcagtacttttccatgtagcgatcattggctgccagatatttcacattcgtaaagtcgccagttcgttctgcttctgcgatggcttcgcgatcttcataactcaggtatttgatcaggcgatgttgttcctgaatccacaacttaatagatgacggcgagccgtcaatcatcacactcttgataccttgaggatcgaagctggttaaataatacatttccagcataccgccccatgattgaccaagcatgtgaagctcatcgaggtgcaggtactttcgtaaggcgatcaactcttctgcccaagtttctttaacataaaccgccggatcttctggcagtgacgacttcccgcagccgacttggtcgtacataatcagttgccggccggtttcggcatagtcgtccatgagttcaaaataattatgcgacgaccccggtccgccgtgaatcagtaacaacggcgccttatcagcactaggttcgccaacgattcggtaataagttttatattcatgaaacggcatgtagccttcttggattttcatagatgcaccagtctccttcttaaaaatgatgatccttaccgcgattgtactacgcattgatcatggtgtcagaaagaatcgaagcgcgatcgccaacccggtttctggatcggtggtcgcgcttcgaagatgatatgtttgctctcaatgctaacttagcgctgtgctgttatccgagccggcctctttgatcccaacttaatcagcatcaaaacagatctaattgtcgtggggcaagacccggaaagtccagacccaacaaatcgatcaaactttgcgcattggctgcagcatcgtgaccaccattattgttgaagatgacagtaacatttttacttttcaaatgctgcgcgatcatgccaaactgctgcagttcttcttggctgtaacgataattggttctttcagtcgttttggcgccggttcgaccccatgccggatttcggccatgcaagcgcatcatggttaaatcggcattcgtggcaattggcacaagcggcactgagccgctggtcgtctgcgcttcatcaacgatcacgtgaatgtcgccggctgcttgcaacagcgccattgtgttggcacgataagccggcaaataccagctaggatgacgaaattcaatggcaacaggtaaatccggcagtaaacgatttagttgctgcaagtagcgtacattttctgcggtcacgccaaaatatggcggaaattggcacagcaccgcctgcaactgatggcttgcaaccagcggtgccaccatatcattaaatttggaaaagtcagcgactgtgtctgcactttcttcgtgtttcgtcatggttcgcgtcgctttaattatgaactgaaacccagatggcacttgggcctgccagtggcgaacctgttccacagacttcaatccatagaacgtcgtgtccaactccagtacaggaaaatgctgagcgtaatccgaaaacgtactccgattgccgcgcgtcgctaattctggatgatcggctacactcgtcaaaccaacattaatcatcaatttcaccatccgcgatgcgaaaatcttctaaccgatcgccggtaaaataagatgcataatcatggcgttcgccattcagcgcgaagtgcaacagtggctgtaaatctggtaccaagccgggattatccgctaacaaccaatcttttgaaaaagtcgctaaaatgccctcccgggtggctcgcggcatcaccagctcgtcttccgtgtggccaaagaaggcaaaaagttcggcccgcaactcaccatcaacatgccagaacatacgcccgccattgatcagatcatgcgggggaataataatgtgactttcttcctgcaattcacgtgaggcgcaagtagctgggttttcattaggcaggaatttcccacccaatgtattccacatgccacgatatggtggattcgtccgattaattagcaaccagccgcttggggtttcgacagtgactaaggtatattttttgaccatgtttgctcctttgctttgggatcatcactagcaaaaaggcgccgaaatggcgtctcttttgaatctttgctgacaggccttttttgcggggatgcgtcaaaccgcccagattagctgaccgtgaaagagcgctcgtaaaaggacctacttcattttttcaaaggtatccttaatgataccggcagagtgaacatacttagcacgctcttcatctgtcaacttcaacgttggcgtcttgataacaccttgtttaccgatcatggctggatgaccgatagcaataccgaattctggatcgtaattagcgcatgggaagatgcgatgtgcatcgctgatgatcgcctgtgtcatttcagtcgcgatagtggcgataccgtagctcgtataatgcttagcctgataaatcttccaaccgcctgcccgcgcatcatcggcaagctggtcgtaatcaaccttcgcatattcagcaatcggttcattattgacccgtactgttgaccaagcggtaaattgcgattcgccatgttcgcccatattgtaaccacgcacgtcagcaacattcacatgcaaggtatcggcaaccgcccgtcgcatccgataagtatccagcgaagtcccagtcccaataatttgagacttcggtaaatctaggagatattgccagtaactcgtgacagcatcacatggattggtgatatctagcaaaacgccatggaagccagacgccttcagttttggagcgacgtcatctagtgctacttttgaagtcttggtttctccaattcgatcaccatttgaaatggcgccaatattgccgaccgcggaaataaccacatcagcatctttcaaagcatcataatcgttgacaacaatgtcagtataagtgggcaagccgccaagcgcatccttcaagtcaaagctttcgccttcagcaagttcagcctttttatcaatcaagactaacttgtcagcaacccctttgctgacaagattaaaagccgtggtcacacctacgtgtccaataccaataataccaattgttcttgccatataaaaaatctccttttcaaaatgcgttcattggcgtgatttcttttttgaatcagccatcaagtgacgttcaatgcgctgatccggaatcgcccatagcagcaacatcaataagtctagtatgatcgtcaacggcggccaaagcaaagccaataacatcgcaacaagtgcaatcgcgacggaggccgctgctttccagttgtgccgctgacgatataagtctgctaatgccgatgttggtccattgacgcgaatcagggtttgtactaatagcacatagctgatattggccatcaagatcacaaacccataggccaattcagggccaaatgtccctacgtgtccttcgcctacccagctagtggcgaatggaaacattgacacaaccagcatgaagaaagagttcgcccacatcacccgccaatcgattcgttcgaccagttgaaacaagtgatgatgattattccagtaaacaatgagtgtcaaaaacgacactagataaatggcaaaaacaccgcgtagttgccataacgaagccaatgatccgctgtgcggcggttgcaattctaacaccagaatcgtcaggataatggcgataaccgcatctgtaaacgcctcaagccgccctttattcatggcaatatcccctcacaaagttatttttggaagcttcgccttcacttacagaatttcccagatgatgagcaaaagctaagttgtgattgcttcagactaccagcttcgcaaatacgtccaccgcatccccctgcaccatatgcgcgccttccggcaatgcgatcttttcacggttcacagcgacaatggtcgcctctggttgcgcatagccaatcaaccccgcaaatggataaaccacgaagcttgttcccaccacgatcagcaaatctgcagttgaaatggcttcgatcgccgcactgacggtatcgggattgattggctcaccatacaacacaatatctggtcgcaaaataccaccgtcagctgcatgaatatcacttttcagataggtctcgtagtcaaaatgcttgtgacaagtttgacaataaatgcgataaaggttgccatgaaattcaacaacatgctctgcaccggccttacgatcgaggccgtcaacattctgcgtaacaatcgtacctttttgattggtgatggttgccattttctcgtgaataacgttcggtttagccgctggaaagtacatattattgacaacaaacttatgaaaatcttcatgatgtgcttgtaaattatcaatagacagtgcatattccggatcgacttgatcggcgtatagtccgcccttggaacgataatccggaattcctgatgctgttgagacccctgccccagtcatgaatgtcacatgcttcgcctgctgaattgcagtttgcagatcaaacatatatggtccctccttaaacgcgatcaccggctcagaaacctgcacataaagacctcaagcctaaaaggccgcttatgctccggtttctaaacgcgttcgttcacgcgctcatcttttagcagatatttttcaatgatgaaaatacgcaatcaaaccgtcaatccttagcatgacgcatctttaatatttcaagttgcgtttgaatggttcacatgcgctattaatttaaatcaaaaaaggtgtaacataacagtagaaatactttcagaaaggagtcttgatcatgaagtcatttcggtggtcacacgttattagttatctgatcatggtcatcgtccttgttttctttgccttcgtcctttatcaggtcatcatgctcggtgttcattccgtttccaatagtttcttcatcaactttggccggcattaacgaatcgtgtagtcgagccgatactgcgtcagaatgtcattcagcgattgttgatacaactgctgaaaggcttctggcgttgtttctttttgtggcaagggcagtacaaacgcattttgctcatcgctgcgtcccatggcaacatatgcgggttccttggtctcgcgatcacggtagccactgtgtttgatcatgaaaacctgatccaaggtaaggcgtaattgccgatgcgacagaacaggcgtcaacgttgcaaattcagcatcgttggtcggttgatagcctagccgttcaatcacggtatcaaatcgcgccagcaggtgaacaacggcgcgtcgtaatccaaatggggaatcaagcttctgcgcatccggcaagtcgtaaagttcgcgtgcaagcggcaaagcttgtggataggcatttgctaattctgccggcaactcaccatttaaaaaccccaacaaatcaagcaacgatagcactcgataaataaccaactggtcatcggcttctgctggcacattttgtttgaagccggcgagcacttgcgccaccgctgcgtctgtcaaaaggttgtgatcgcgttgccaggccaccacgagcatatgcaccgcagcattgtatagcgaggtgctcgtggcataaagttgatcgtctacctgcggatcaccgctcaataaatggaattgaagttgcggataacctttcatctggaacaacaggtgtagtaactcatgacttaaggtgtaatcgacattggtcgtgtccgtcactgctaccactagcgtaccatcttttttcaattgctgatggctttgatcgtgcgttaagacgccgctcgcctccccactaatgtcgacttctaggggatgatcatagtgttccttgacttcatttagtaatgtttcaacgtcttcctgcatcgtattgcactccttaaacgcgatcacagccgcagaaacctgcacataaggacctcaggcgtaaatgacccaaacccagccgtttacgcctgaggccgcttatgctccgatttctaaccgcggccgctcacgctctgtgataaattggctttaattatttttatcctctatcattaaggtagcgataaaagggaggaaattcaaatgaaactatccgtaccacttatcaatggtcaacttgccgatcgctatggcaagcatgcaagcggcagtgacgttaaaaatggctaccccattacgagttttccttttacgattgaggatgcccctgccgaaactgtcagttttgcactttggttccttgactacgatgctgtaccggttgggggcctaccatggattcattggaatgcagccaatattcccgccgacagcacaacattcccagcaggcgccagtcataccaataaggtgccaatggtcgaaggcaagaacgccaccgctggccacctcgtcggcaacaccgacccgttcacacaggctggttatgtcggcccgcaaccaccagataaagatcacgattataccttaatcgtctttgcattggatacgaaattgccactgcaagctggcttttggctaaatgaagctcggcacgcgatgaagggccacatattagcacaagcagaaattgatctgccttcgcgcgtttaaccgataaaaatgaaaaaacccctgctgacgctggtcagcaggggttttttcattttgataccagcttcttaaactgtcagctaccatcgcctgtattcagccataaggcaccagcgccggctgcagctaaaacgccgacaccaataataccgactaacgcaaacttaaaaatggcaaagccgccaagtgcaaacagtatcagactgataaagggatgacggaggatcgcacccagtaacttaatcaccaaaaacaaaatgatgatcaccgccaccactgcaccaatcaaaattgcgccagttaaggtatgaccattgccactaccttctgtcgttgttaaaatcgccggaatcatcacaaactgtcaccccttgcttaaaccgctaaaaattatttgatcaggctctgaatccattgagcgataccattaaagaaactcacgatgccatcccagattttttgcaggaaattccgattttcttcagtgttcaggctcttattgagtttatcaaacaagcctttagcagaattctgaatggaatcggccagcttccctgcctgtgctttaaagtcattgttctttagtgagccggctttttgaacgttcactagtaagttgatgatcaattgccgctgattgttgttaataatcgttgttaaattattctgtttaagctgactgtctacgatgttaccgatctgattttgggacaaagtctgctgaccgttgttactttgactggccatttgctgtttcgcacccgccacggcattattgagctgcttgtcagaataaccatctttgtccttattcgcttgggtgatcgaactcaaggtgttgacttcctgctgagcagcattgatttgctggttattcaaattttcgccattttgagcaaaagccgcataaacccctgccaaggcacctgaaccatcaattctaaccgcgctggtaatgtagaggttggcattgctaaccccagcggttaatgccgcattacgatattgatcagcggtgatggtggtgatgttattggtgccattataagggacgattttgacattaatgcccccattatcagtcttttgaaccaacgcgctagaccagacgcctgagctttcagtaaaagtactacctgaaggattgaggtacttcaccagtgtggcaccattcacggtcagttgactggcattgttgaccccggcagcattttgtaaagtgctcaaggtgccgcttttttgatcagcagtcagtgaggaaccaattgttgccactggttgtgaccaagtatcggctcgcaccacatgcggtgctgcggtaagcaaggccaagcctgcaacggccaggcctagccatttcataaattttttcatgagtaaaatccatccttttaaatgcgttctccagcccagaaacctccgcatagggacttcaagcacaatgattatgacccagtcatcgcacttgagcgcacttatgctccggcttctaaccgggctggctcacgctctcctttagattggtaccttcattatcgctgcttcagtgcaccccgtcagcatgtttaccagacttttaagcaatgattaactaatgctcacgctgtgtcaccgcacgcgtgttcaaatgatcgtacagcgcgccttctcgcaagccaaactgtgagaaggtgagacgatccgagtctagataacgaatcatcgagataaccggcatcaaaccgcccacgataatatcagcgcgaaactttgacagccccggaattgactcccgcatggccaaatctgcaccaagaatttccttaaaaatcgcattggcctgctttgtcggcatccgatagccgtgaatcgcctcaaaatcagccattttttcctttcgtcgttcgattttcgccaacgtccgattgcttccgccaagcgcgataatcggcaaattctgtgctcgccgcagccaccagatgctgttaaaagtctcatgaataaacgtacttaaggcaaaatactccggcgccgaaatcacatccggattcaaaaaccgttcggacaggttaaccgagccaaaaggaatcgataccagatgttgcaacttccgattttgaaccagaatcaactcggttgaggcaccgcctgtgtccataattaaggcgttttgaatcggcaaggtgttgatgacgcctaaaaagtcatactcggcttcacgcgttcccggaatcacattaatgatcaaccccgcctcgttcttcacccgtttgaggaattctttttgattcttggcttggcggacagcagctgttgcaaccgcctttaaatcaatatcagcatacttattcagctccgtcttaaacccctgcaaggctttcagggtgcgatccattgctgcgggctgcaaaacgcgatctggccccatatcctcagacaatcgcaccatttctttgagccgtttgatcggcttgacaacctcttgctcgatttcccagatcgtcatccgagctgagttactgccaagatcaattactgcaaaatgatgcgtcatgcgtcatcgtcctccttgggtgcggttatcggaataaaagtatgcgttgcatgcaagtcttcaggagcatcatcaacttcctcacgtcgcaatgcttcacccatggcttcagcatgttcaatgaagtatgcctgtgcattgagttttgtaaccccgcgtaattgagcacgaacccacgtactgtccggttgtaaaattcgcgttttaacgttatctgcccacatgatactgaaaattttgatgatgcgttcgcgaatatcgtcctgcaaaatcgggaacagcagctcaactcggcggctcagattgcggttcatcaagtcagcagatgaaaggtaaacattttcctgcccatccgcataaaagtagtaaattcggctgtgttccagcaactgtccgacaatcgaatgtactgtgatattgtctgaaactccgggaataccaaccttcaagttgcagatcccacgaataaggagatgtatctcgacaccggcattggaagcttcatagagcttctcgatcatggccgtatcagatagcgagttcatcttcatctggatcaaggccttgcgccccgccttagcagcagtaatttcttcatcaattcgatccattagatagtctctgatgcccagtggtgcaatgaccagcttgtgaaaatacggtggttccgaaaaaccggaaagcatgttgaaaatattagacgcatcttcgccaatttcgttgttgcaagtgaacaagcccatgtcggtataaagccgcgccgtcacatcgttgtaatttccggtcgccatgtgcatatagcgcttgatgccttcctcttcgcgacgaacaaccaacgccagcttacaatgtgtcttcaaaccgaccaaaccataaatcacgtggcaaccggcatgttccaattcttgcgcccaatgaacattattctcctcatcaaaccgcgccttcaactccaccaataccgtgacctgcttgccattttctgcagcttttttcagataacggatgatcggcgatttgcttgaaacccgatacagcgtcatttttactgcaagcacttgtggatctaatgctgcttcgcgaataaagtcaacaactggctgaaaactgtcataagggtgctgcatgaagacatcgcgatccttaatgacatcaaaaatcgactctttcttgaaatccggatccatgtacggtgtgaatggcttgaatagcaaatctttatgatcgtgcacttgtttgaccaatttgctgagaaaattgagatcaatcggaccatgaatttcataaacgtcttcatccttcacattcatagccttgatgagacgtttgcgcaaatgcttgctcataccagcttcaatctcaagccgcatcactttcccgcgttgacgctttttcaactgggattgaatctccttcatcaaatcagatgcatcctcttcggccacatccatgtccatgtcacgggtaacccgaaatgtagccgtttctttgatgtcagcaccaacaaacagctcactgacaaacatccgcacgacttcttcaagcaaaataaagacattgtcgccgcctggcagccgcaaaacccgcggaaaaacatcaggcacctgtaccatcgcaaacgaccgtgacttatcgcctttatcatcaggccgaaccagccgaatggccaaattcagactattattgccaagaaatgggaacggccgcgtcggatcaactcccatcggggttaaaacgggatacagttcataatggaaataatctgagacaaaatcgtgctgtttctccgtcaattctgatgcatgtagcagttgaatatcgacagcactcatttttggcaacagcgaacgaaccaatgttgtgtattgtttctccaccattgcgtgggcggtttcggaaattgcgtctaactgctcttgcggtttcaatcctgctgcatccggctgatcataattaactgtgaccatttttttcagcgacgcaacgcgaatattgaaaaactcatcaagattgctttgcgtaatacccaggaaacgtacccgttcaagcaacgggttattcttatcccgggcttcttccagtacccgatcgttgaatgccagccaactgagttcacggttattaaaataacgcggctttgaaaaatctagtttcttcataaaatgtttcttcctttcagctcaagccctagcccgaatacctcagagaaaaactttcctttgcgtgctaatgtccagcgttcaagttcaatatcatcatcggctttggctgttaacagcacttcatttggtttgacagaaacccgtaattgctgaatcttctgttggcgagatgcgtctagactatctgcaacgcgtagcaaggcggataacttagccacaactaagcgattttcggtcgacattgttggaaagttctttaagtccgattgcggtgtaatggagctgtgaaaccgtgtaatcgttgccaccatggttacttcaagatcattgagtcccataatttcagatgctttgatgatgtaattagaatgtgcgtaatgtttgtgtgtttcaatgtaactaccaatatcactaaccgttgcggcgacttcaagcaaaagacgctcgcgtttgcccatgccgtgcaactttttcaatcgatcaaacagctgtaaggcaaccgtccgtgtggcttgcatatgggcttcatcaacttggtagcgttctgccaaattattcgcactgatgacaatttcttcattcggatcaaagcccagctttttaaagccgccttcatgtgctgcattgacttcaataccatcaatggctttaagatctgagatccaaatagattgactgttgagcgtttcaaccaaccgatacaccagcaaaactgtcggcaaaaccagtgatgtttggtcagaagtcaaatcataggtatctgcaaggtactggtcagaagcctttgtcacttcatcgtataataaatcaaaccctggccgatcagtttctacctgatgcttgccttccggaatgatattttgaaaaatcgacagattactacccattaaaatcatattggtgtactcaacaccttgtggcaacagccgcataaagtcgagcaagcgactgtcgatatagtcgcgcatcacttcaacataatttgtcaccgagcgttgaacatcactcatgatttcatacactcgcaaagggccaagtgacagattacgcgagaagccaaacacgccattgctgaaagtagtcaactcaactgaccctgaactgatatcaatcagcaccgtgcctttttgcgtaatcgatttaaactgcggaaacttcaccatgatcgcttgggtacgaaaaaaggcttcttctgatagtgaggtagttttaatgagccagccggttcgcgtataaagctgatcacgcacaaactcggcattatcagcttcggcccaactggtacttgcaaatacattaacagtcggtacgccatagtctttaaaaatttgattgatggcatcaaacgcttgtacgatcgcatcaacagtatcgggcaaaatttcatgttctgcataaaaatcatccccaatggcaactggatatctaccgcgttcaattgttttcagcgtccgcagatttgtgatgctaaaaacgattgcttgtgcaccgatcatcacaaacccttgtatattatttgccattctcgttccacccatttcttttcgtttgctacctgactgtcatcatgctctaatgccatgatagcacggtaaacactgcctgcatggctttttagacaagccttattactgacaatcggtctatctacctttagtttaccaaaaatcggcatcaatctttactgaatgtgctataagtagcgctttcttcaacatttggtccgaccaatggcagactcgactgctggctagtcagtcattggccaataccacagacctaataaccatcacaaaagcatgcgatagcctcaaattagctcgtctttgagggtgctttctcacgcaatcatcactgcttttgtgataatcttaaagcatcatggaacaattctgaaaggatgctcattatgaaaatgattgatctaggccgttctggtctgcacgcttctgccattgcgttaggtgttatgcgtttgccgaatctcgatcggccgcgagcaaccgaactacttgatgctgcttatgacgtcggcattaacttttttgacaatgctgatgtttacagcaatggtaaagctgaacagctttttggcgatgcgttgaagaaggccagctttacacgtgatcaagtcctgattcagactaaggtcggtatcgtcaatgatcgaaaagcgacccatcgctatgatttctccaaagagcatatcgtggatgctgtcaatggcagtcttaaacgccttggtaccgatcatgttgacagcttgctattgcatcgacctgacccgctcatggaaccagaagatgttgctgaagcctttctgcaattgcaaaatgaaggtaaagttcggcagttcggggtttccaacttcaatcctgctcagattgaactgctccaacaggcggtgccgcaacgattgatcatcaatcaattgcagttttccctgatgcacacaggcatgattgatgccggcatgcatacaaacatggcagatgcccgttccattgatcatgatggcggtcttctcccatacagtcagcagcatcatatggcaattcaggcgtggagtcctttccaatatggcttctttgaaggtgtcttcatcgacaacgataaattccctgaattaaatgccttacttcaaaagctggccgatcaatataccaccaatcccaacgcaattgctgctgcctggctcttgcgtgtaccagctgatgtgcaagtcatcgccggaaccaccaaacccgctcgcattcgcgccatcgccgaagccggcgacattgctttgacccggcaagaatggtatgacctctacttcgccgccggaaacgacctgccataatcagacagagcgttcaatggcgcggttagaaaccgacgcataagcggcctcaagtgcattgaccgggctttggtcagtctgcttgaggtccttacacgcaggtttctgcgactgcaaacgcgtttagatagagcatgaaccaacacatttttaaaaggaaaatcctatggaaaaacgactcgactacattacagatctcatggcacttggtccaaccgccaatgcaaggaccattcagcgtcgccaaactgcccatcgactcgcaattgctgaggcatggcaggtaaaacccggcgaaaaaattttagaaatcggctgtgggcaaggcgacctgagcgccgttttggctgatcaagtcggctcatccgggcatgtgactggcattgacatcgcctcacctgactacggcgccccgctgacgcttggccaagcatggaaccacttgcttgcgggaccgcttggtgatcgcttaacggttcatttcaacactaatctttcggatgatcttgggcccatcgccgatcagcattttgaccgggttgtcctggcacatagtctttggtactttgcttccgccaacgccctcgccttattattcaaaaacatggcagctgtctgtgatcacgttgatgtcgccgagtggtcaatgcagccaactgcgctggatcaaattgggcatctgcaggcggctatgattcaaggcttgctgtatgccattgcgccaagtgatgtcgccaacattcgcacgttgatcacgccggacactttggcacaaatcgcacatgataacacatggacctacaccgctggcaccatcgtcgaagaccctactttagatgatgctcactgggagattgcaacaaccaatgcgcttttgaccgaactcaagctcagcaccgatttgcgtgatcgtgtgaaaccattgctcgaggctatgagccataacggtacggcaagtttagcaacctttacgggccgcatcacattttaaccaaaatggaggtcatcagacgttgattgaatttacccctgccacagccagtgatttaccaaaaattgtcgccatttacaatgaaactatcccgacccatcaagcaaccgctgacttgcagccgcaaacagtcgctgagaaacaagcttggtttgcggctcacaataaccattttcccgcttggatgattcaagttgaccacaaaatcgttggctggctgacactgtcggcttatagtgaccgctcagcttatgaccaaactgccgaaatcagtttataccttgatgtggccgcccgcggtcaccacgttggcagcgcggcattggcctttgttgaccgcgaagcacccaagcacgacttaaccactgttctcgcccgaatttttgggcataaccaagccagtcgcaacttgttcaccaagttcggttatgaccactggggccatttgccagccatcgctatcctgccagaaggagaagcggatttagaagtctatggcaaacactttaaaagcagagcgtgaactggcgcgcttagaaaccggagcataagtggccgcaagtgcattgaccgggttttgccagtgtgcttgtggtccttatgtgcaggtttctgcgccagtgaacgcgtttaaaagagcgtgaaatggcgcacttagaaaccggagcataagtggccacaagtgcattggccgggttttggccagtgtgcttatggtccttatgtgcaagtttctacgccagtgaacgcgtaaaaagcgtttgactgatgctaacgggctgacccgttggcgatcaatcaaacgcttttttaatcttggtgcccggccaattcatcttcctgctgtctaatgcgccgcatcgtccgaacatacgagctgactagtaccagcacactgccgaaccacgccagcgggttggccgccgatgcaccagcaaaaccgaatggcacaacgaggaagatcgccgcaaacgcccgcatccccaattcgaagaatcccgcaaccgttggcaccaacgtctggccaagaccttgcaacaaattacgaatcgtgaaaagaatcgccaacaaccagtacatgctggcattgaagtgaaaataagtctgggctaaggccgtcacagctggttgattcggcccgagaaacaaattcactaatggtttgctgaaaagaataatgaccacacccagcactgccgataagccgacgttcaccatcaaggtttgataaactccgcgacggattcgcccatattccttcgcacccagattctgcgcagcaaacgtcgccattgccaccccaaaagaggctgacggcaaggtcgctaactgatcaattcgcccagccgccgtatacgcagcaaccgcattggtgcctaatgtattcaacatcacctgcaaaatgacagcgccaattgcgataatcgacatctgaaaccccatcggaagcccaacttttaaatgctgaacaatatcgtgccaatcaaagcgcaaatcacgacgccgaatcattagaagcggtatccgcatgcgaatgtaaatccaacagagcaacgccgcgatcacttgcgcgctaaccgttgcatagccggcaccagccaccccggaatgaaacccgagaatgaaccaaaagtccagtacgatattaataatggtcgcaatgatcaagaagaacagcggtgttcttgaatcgcccagtgcgcgcagcatattgcttaacaagttaaaactcattgatgcaataatgccgaaatagataacccgcacaaaggcaatcgaaccatccatgatatccggtggtgtctgtatcacggtcaataatggtcgtgtcatcgtgacggctgctacggtgagaatcagtgaaatcccaaccgtgatccaaatgctcgtaccgaaactgcgtcgcacacggcgataatcatgagcaccataggcctgtgctgtcaaaatagaaagtccagccgtggtcccttgcgcaaatccaataatcaaaaaaacaatgctggatgttgccccaactgccgccaacgcatccttaccgatcgtccgcccaacaatcaacgcatccataaaactataaagctgttgaaaaagattgccaatcagtaatggaatcgtgaacagcacgattaatttcaatggcttaccgatggtcaaattacgcattaacaaatcctccaaaaatgatcgtgtgctcacccaatcaggatcgcacttttcaacaacgggattgcacacgtaaactacctgtccgtcatcgggtatcactgataagcgatatgacatgcgctcgttcccgttcacaaaagactaattcaacaaccatagcacaaaaaaccaggcagcgactcgctgtctggtaattgaaatatatttgcaatcaaacatcggcaccaccgccgccggaactgccgccgccccaactggaaccgccaccagagccgcctccgaaaccaccgccgaagccgcctccgccgccacgccggccagaagatagcagcgcgtccagaataacccagagccaaaagctgctgtcacctcgaccacggcgaccaccacggccaccgccgccgcgactaccaaagatgatggccacaacgacgacagcgataaagatgaaaacaattttcgtcaaaaagttgccgccgctgtcttgacttgagttgcgatattgattcatcgtctcatcagaaaccgtgttttgatctttagggaacttgtatttcttatcgatgactgtcgcaaccgcattgaaaaccttgcgaatggcctgattcagttctttaggatcatgtgacttgatgtccttcagattgtcattcaagattcgcccagccagcgcatcaggcaaatcgccttccaaaccataaccaacttcaatgcgcatgttctgcttgccgccgttattcgcataaagcaaaagcaccccgttatcggtacctttcttgccaattccccatttctggaaaagatccggtgcatagtctgacaaggggtcgccatgggtcgactttaaagctgctacggcaatttgcggctgttgtttagtgccttggtaatactgattcttactgtcgatcagttgcttggtactttcatcaagcacactgtcttgatctagatagtaatgctcggtgggccgtgccggcagatcttcggctgccgccactggctgcgcggcgccagtgaacaacaacaaacccgtcagcgcggcaacaaaccacgctaaatgcctgcgcatggtgccacctacttcccagaactagagctgttcgttgaaaaatcaacgcttggaaccgtttgggcagccggtgttgctttgaaggtgtccttcttccctaagcccatcatgctagcaaaaatattcttcgggaaggtcacaacactctggttataatcacgaacctgatcaatatatcgcttacgttcaaccgagattcgattttcactaccttcaagctgcgtcatcaaggtgttcacctgattgctgctttgcagtgtcgggtaattctctttaatcacgttgatcaaagtacccacactcttgttcaactgatcatcagccttagctttgtcagttgtcgaacttgcattagcatacgacttgcgggcttcagcaatgtcaccaaaaactttctgctcttggcccatgttgcctttaaccgcattaactaagttaggcaccaagtcagcccgtcgctgcatgacgttttcaacctggctccattgcgcttcaacggcctgattctgcttagctaacgagttgtaggtgccgattccgaagatcaggcagatagcaacaatcacaccaaggacaatacttgtgaccgcaactggacttaatcgtttcgttttcattgatatgaattcccctctaatgcattcacaattacctaccttttcacggaaaaagccgtcagaaaacaacggtatttccgtgaaaaggcaggctacaactgctcacgcttatcatcaatttcctacttacaccatcattctaccatgacaacggttttcgacatccggcttaagacggaacttgactatttaaagtagttgaatccgatcgcatcccgaacttcctgaagcgtttgattagccaccacattggctttagccgaaccttgcttgagcatatcagcaaccgcccccatatccttggcatagtgctcccgccgagtgcggataggttcaagcactgcctccatgacatcaatcaggtagcgcttgatcttcacgtcccctaagccgccatgttggtactgggctttcaactcagcaacttgctgcttatcaggatcgaaaatatcaagataggtaaagacaacattaccttccaccttaccggggtcttcaacgtgaatatggcccggatcggtatacattgacataatcttctgcttaacggtatcagcgtcgtccgccaaatagatcccgttatttaagctcttgctcattttggcattgccatcaatccctggcagccggccaagaccctttggtggaaaatagccttcgggttcaaccaatacatctttgtgataagtccgattgaacgtgcgcacaatctcacgagtctgctccagcattggctcctgatcgtcacccacgggcaccgttgtcgccttaaacgccgtaatgtcagccgcctgactaacgggataaatgaagaaacctgctggaacgctatcacaaaaggctttttgtttaatttcagctttcacggttggattacgttccagccggttcaccgtcaccagatccaagtagtaagccgttaattcaaacaaagccggaatctggctttgtaccagaatcgtcgtcttgtctgggtcaatcccaaccgccaaataatccaaggccacttccagcaaagagtggcgaattttttctggatcgttggcgttgtccgtcaatgcctgcgtatcggcaatcataacaaacggtttgtattctccagagttctgcagttccacacgatttttcagtgaaccaatatagtgaccaatatgtaaccgtcctgttggtcgatcacctgttaaaacgattttctttgccatacttgtttcctccttatattgtgagcgcgagccagcgtgggtgaaaccggagtgtaagcggccttgggcgtgatggtcgcactttgaccattgcaatcaaggtccttatgcgcagttttctgcgactgtgagcgcgttatcgtaaaaaaaagcgccctatgtcataacaacataggacgcaagcgcgcggtaccacctaacttgtccgccttgcggacctctcttggcttaaggcgcacccaccgaacataacgcaaacgacccaactttgcctaccatggtcatcgacgtcacagcattgccgactctctggagaccacttagataagctactcatcgtttgtgtgaatatgggtttaggttagctaaattcgctagtgatgtcaatgcaaggttacatctgtgacttataaatttgctcagttttgttccaactaatgacatcaattattcgatgcggtatcaatgacaaatggcatggtaagcgcacctttgattcaatcaaatcagccacgtttctgcccatattaagcctttataatgtcaatcgggtccttacggctaatcagccgaatcggccataagctagcaaaaatggtcaccccgaaactcagagcaagattagtgataaaagctgccaaaatgatggctctgaagtgaactcccaaatgcagcgccattatcgttgccgcaaccacaattaaaagcgcagcaccaccaaaacaatagcatccgtatttcatggcattccagaaaagaatgcgccgaacatctttagttgtgaaaccaaccgcttttaaaatcccaacttcccgcaatcgctgtcgattgttcatactgaaaagtatgatcaacgcaatcatacttgccatgatgaataaaagtgcaatctgccgcgtgccgttcttcgctttctgcacagcagcattcagtgacgccacattctgtgcaactgaggaaacactataaaaaccggaacttgatttgatagttttagtcattgaaaccatatcgttataacttttagcttccaatctgagcgcgctatacccaaaaggctgttgcttgaagccttgaaaaatctgatctgacgttgtatttgctcgaatcgcgctgtgcagcaaagtcgtcatgctagcatcatccatgaaaaaagcgttaccttgctctgaccgatcgtaaggatagtttgaggcatagacgccagtgatggttgctgccaatggctgctgaacatatatattgccatctatcgcgaccttctttttattattggttggcagctcactttctgaaagatattgtgcatatgaaatatagacttcaaatgctacttgtttacccatcgcagattttgtcgatatgtgatttttttcaagaaagtcttggctggattgaaaaggtttcatcgacatgataactttttccgcctaatgaaaaattggaccctttgggaaccggctgtctaacattttcttttgtcaggccatatgaaagaaaggtgtagtaaggctgtacagatgtaatccccggcattttcttgattttttggatctgtttaatcgtcaaatttcgaaatggatcgagatcctgatgagtgcccgtaccaagggtgttattcgtgacaaaaagtgaattatccgttgcttgattgagttcgcgttgttgctgacttgccaaaatttgtggcacatttaaaactatgctggcaacggctaacatgaccgtaacaatgacaaggaagccaataggcagtttttttgctgattgatagttgtcatagacgagcgcttgcttattggacaaatctgatcgatatgtaacagcagatgctgtcggttggcctgccatgctttctggaattgcacgattgaaaagtttagtacccgactgaggcactaattgcttgttattgatagtcaaaatttgatcagcatagtcttccggcagcgtttcatgtgacgcaacgatcacaatcgcctgttgttggtgagcaaagtccgctaattgttcataaaacatacgggcattttcactatctaaggaattggttggttcatcagctaaaataatccgtgcaccggaaatcaaagctcgaccaatagcaccgcgctgatcttcgccaccggataaatcctcgggcaacatgtgacgttggtcttcaagccccagcttatccaaaatggctgtcacgcgagctgctttctttgcttctggcaggttgctttttaaaagcggcactttgagattctcttcaagtgtcatcgtgtcgattaagttatgttgttgaaagacaaagccataatctttcagccgcacacgcgcttgtgtcgcatcatccagtgaccaaagattttgaccatcataaaccacttcgcctgcaatcggccgcttcaatagccaagcacattcaataatgaagacttgccaatacctgactggccttgcaacaaataaaagtagccgcttttaaactcataagagacatcatgtaaaatctctcgatcaaacctgatcgtcatattcttcagcaataaattagatttcattagtgcccccttcaaatactcggttatcagttaataaaaaaaggactggcataaaacctaccagtccaacatataattaaaacaacataccaattaaggtcatatcatcccatatcaaaagagatactgcaaatcactctgcgcacttggataagcatagatcttgtttaaatcactcggcttttcaccagcatcaatggccgctgcgaaggtattgatcaagtcctcagccaagctggctaagacgacagcaccggcaagtcggccggtctttttgtcgacaatagtccaaacttgtgcgtcaggatcctgaattcgattataggtgtaccagtgggttgtctcgttgtgcttgacggtgtattgatcaggcgctgcttcagcggcctctaatgaaaccccgactttggctaactccgttgggccaaagacgatagtcggaatggccgaatagctaatgggtgcttggtcgcctaaaatttggttggcaacataacggccttcgaagccggctaccggtgttaatttaggctgtggcttcaaattgacatcgccgattgcataaatcgtctcaactgcggtgcgaagatggtcgtcaaccggaataccacgcgtatcagccttaataccagcattggctagcccgaggtcggcaacattggcgatacgacccatggcagtgattgccatgtcaacattcaaatcgaagttatcagcatgtagatgggtcatggtacctaagggcgtgattttagtcagttcgacgttaggatgaaaatgaatcccggtcttggcaagcaatggttttaaagcttcggtagcgactttggggaatgcccgtaacaaccgatcagaatgaccgatgatatgcacatctgcgccagccgctgcagcgatgttggccagttcgacactgacataaccggctccgatgaaggcaatgctggttggtaactgatcaaggtccagaaaatcccgactcgttttaagcagattggcccctggaatgtccggataacgaggcgtgtgcccagtcgcgatcacaatatgttcaccggtcacgttttgggagccaactttgacagcatgttcgcccaaaagctgagcatgaccatacaacgtcgtgatcccagcatgagtcaggccattcaatgtgccagcaggtacgccggttgtgtaactgcgcttgaaggccattaaggatggccagtcaatcttcgccgtcccgctgatcccaaaaccattcatgcgcaaggcagcatttttaacttcgacaccgcgatacagcattttttttggatcgcagccatagttgggacaggtgccgccccacaaatcgttttcaacgactaatactttttgctttgctgctaaaccgtaagctgctgctaagccgcctgggccgccaccaatcacaatcgttccataatcataagccatcacgatcactccttcgtctctgtgttctgatcgacaaatgcacttgcgagataagcgacaacactatgggtattgaccacaaacgcaccatgttcactattcacgcgcaacgcctcatgcgcatctaaaagcggcaacgcctcggccagcgtcaagttgccgccaaccgcatgccgggccgacacatccgctgcaaatggtgctaactgactgagcgtgacctgcagaccctgattggcttgcgctcccttgaacaaatccgccacgaaatcgttagccggattggtcgcaatttcttccggcgtattaacctgcaagagtttgccaccacgcatcacgccgatccgatcaccaagtttcatcgcttcagccatatcgtgggtcacaaaaatgacagtggtcttcaaggcacgatgcaaatgcagcagcatatcctgaagctgagtgcgggaaatcggatctaatgctgagaacggttcgtccatcaagaccaccttaggccgtgatgctaaggcccgcaaaataccgatgcgttgctgctgcccgccggataattcgcttggcatgcgattgcgatactcggctggcggcaaatcaactgttgtgagtaactcgtctgttgccgtccgaattttttggcgcgaccagcccttcatttcggggatcacggcaatgttttgcgccaccgtcatggttggaaacaaggcgatttgctgcaggacataccccagatcccaccgcaagtcgcgcattttgtaactggtgagcggtttgtcggcaaattcgatgacgccgctcgttggatcaaccaaacgattgatcattttcagcgtcgtggttttgccgctgccggaggtgccgactagcacaaataactccccttgatcgaccttcaggctaagatcgttgaccacgggcttgccgtcatattcctttgtgacgtgttcaagactgatcaatgccatcagcgcacctccttcagcaagccatgctgaaccaaatagcggtgagccacagttgcggccttttcgttcttcacactcacggcataattcatggtctgcatctgtttttccgtaatttgaccagccaacttgttcaatgcagctacaagttgcgggtgtttttcggcaaaggccgttcgcatcaatggcgcaccgcgataaatcggaaacaaccccttatcatcttgcaacgccaccagatgatattgccgcaattgcgcatcagtcgtatacccatcggtcaaattgatctgcccgcgatctaaagcttggtaacgcaaggaagcatccattgaatccaccttaaactgcaagccgtattttgattggatgcccttatacccatcttgccggtcaatgaactctaaatcaaatccggcgcgaatggatggtgcaattttgccaagatcgctaatggtatgcagatcataacgcttggcaaaactttccttaacgactaaagcataggtgttgttatacgccatcggtttgagataactcaggccttgtttagcaagcagtttctttgcaagtggataattatctttaccagccgtcacctgttgttgctgagcggcagatggtttcgtcaaacttgccagaaccgtcccggaaaactcagggtatatgccgatcttatcggttctcaacgcattgtacaagaagctcgtctgtccaaagttcgatttcaacgtgaccccgacatcaggatcagctttttgaatgagttctttgtacatattgatcaaaatatccggttcactgcctagttttcccgcaatcgtgatagtttcctttggtgcggtcgcataagtgtatacttggctgccaaccataccaaggacggcaaccgccacaaccccgacactgaccttccaactgactttttgcatgacatttaagagccacgaaaagacaatcgccaatagcgctgctgccaaagcacccattaaagttaacgccgcatcatttcgatcaatacctagcaaaatgaacgtgcctaagccaccggcgccgatcaaagctgccagcgtcgcggtaccaatgatcatgaccattgcagtccggacgcccgacaagataaccggcaaggcgatgggcaattcaactttgaacaacttccgcaatcgactcatgccaaacgcatcggctgcttcttcataggaaggatcaatatcgcgtaaaccgatatatgtattttgaaaaatcggcaataaagcatacaccactaaagcaataatcgctggcagcgtcccgatacccacaaacggaatcagcaaccctaacaaggccaacgaaggaatggtttgcaaaacaccagtcacttgcagcagcactgccgcggttttgtgatgcgtctggacccaaacggccaatggaatcgcaatcacaacggcgatcatcaaggcaattaaagatatttcgatatgttgccccaaggcactaagcaactcgccgtgccgttcagaaattgtccgccacaaatcagccatgttatgcctccaattgaatgtgatatgagtaagtgtaacacctagttttcacgtgcaacaagataaggtgtgttatattctggcaagttcatctttcttctgggagctggtgaaataacggtagttcgcgttagcttcgcaggcgcctgccactgtcttaaacgcttcaagaagcagtgccatgggcaatctagctcgaatactaggatagaaagcagagagttggcggagcggcgatgggctcagtggtgagattggtcttagtagagtggttttctccgcttagaccaagaccgagcttcgagacagcgcgccgggcttgcgcgttggctcgaagtcgtgcccaccactctagctgcgcggtcgccaccccgaatcgccgcggagtcaactcggacaataggatcaagcttaattagagtagaaccgagaaaagcttgacacatacaggcctgctcacgctctcccaaacgcgttcgcaggcccagaaacctgcacataaggacctcggacataaatggccaaagcccagccatttatgtccgaggccacttatgctccggtttctaaccgggcctgctcacgctctttacttttccaagtgcccagcgtacaattatcgacaccattttaaacaccgaaaggagcgccgtttctatggaaaatgcaacgaaggcagaagaacaggctcgggtcacggcggtcattgagaagctcaaggcaaggctagcggccattcatgaccagatcgaagcggcgcacaaagaaaccagccggattgaacgatcttacggtgaaaataccaaggtcaacgttaccgaagtcgatgaccaaatggaaaccaacgctgcagttcaacagcagaaagtcatggttgcccgcgccgtcgaaaatgaaaccattctcaaacacgaaggtaatcgtctcaccctgctagcggacaatccttattttggccgtatcgatattgacgaagatggcgatcccgacacgctttatatcggcactgccaccttcattgaccaagatggcgaattcttggtttatgattggcgcgcgccggtaagttctatttattacaacggtatccttggcgatgtcagctacgatacaccagcaggcgaacaacacgccactttgaaaaacaagcgtcagttccaaatcgaacacggccacatcaaaaccatgttcgacaccaatgaaaccgttggcgacgaaatccttcaatccgttttaggcgatcaatcagacgaatacatgaaaaatattgtcgcgaccattcagcgcgaacaaaacgacattattcgtgataccaccagcgacttgcttgtggttcaaggggtcgccggctccgggaaaaccagtgcggtcctgcaacgcattgcttacttgctatatcacagccgtagcgatctggatgctgaccaaatggtgcttttctcgcctaaccgcttgtttgccaattacatctcacaagttttgccgagcttaggcgaaaagaatatgcggcaggcaaccttgtttgaattcttggcaaaccgtttcaccggcttacatgttgaaacattatttgaacgttatgaacatgatgcagctggattgccgccagctgctgagcatatccgtcgctttaaagaagcgccgcgctatcttgaagctatctacgactatgctaagcaaccgaagcggacaccgcattttattgacgttgagttcaacggtgagactttcttctcagccgcaaccatcgcaaaaatttatcaagcccagccagcattgatgcagccagttgataagtttaccgccactaagaatgctttgatcaaacgtctgaatacccgaattcatatggaagccaaacgagactgggcgcagttgcgcgtttccgatctgtcacaaactgaattggaaaccttgaccgccgatcacgaattcgaaaccggtgaagatgaacagcgatttgtctcggaagctattgtctcaaaagcattttcaccaatctacgatgcactgtacaacgatcatttttacgatgtgttccaagactatcagcaattcatggcacaggtgaaaccacccgttgctccggctatctggcacacaatgctcaacgccttttcagacggaatcgaagcgcatcaattacgcttagaagatgccgccccgctgctttatcttcgtgatctcagcaccggcagcggtcaaaatagcctgattcagtatgttttcgttgatgagatgcaagacttcagtatggcgcagttgttgtacttgaaacacgcctttcctaaagccaagttgactttgttgggcgatgccaagcaagacgtgtttaccagtaattatcagcctagtgatttcattcatgaaatcgaggacgttttttccggctataaaattcgactcattacgttgaacaaaagctaccgatccacgcaaccgattactaactttgccaaagctttattaccagaacacgaccatattcaggcgtttaaccgtgctggtgataaaccagaagtcttgacggtagcgcgcacggaagcgcctgatgctttgtcaaaactggtgacgcaactgctggcaaccgataccaccgtggcgattctaaccaaagatgcccaaacggctgatcaactttacgccactctcaaacttgatgcaccagtaaccttgctatcggctaatgaccatagccttaaaaacggttgtgtcattttgccagtctatctcgcgaaaggtttagagtttgacgcagtcatcggttgggatatttctgcaaccacgtatcaaaatgaagccgaccgtgatattctctacacactttgctcccgagccttgcaccatctcacactcgttgctttggacgccccaagtccattgatcacggcactgcccgctgatctctacacacatgcaggggatgcctctgaggcgcgtgtctaatgccacccatgcatcatcaacaaacgcccgtgtcttcgctgacacgggcgtttgtttggcttctagaatcatgataaattatcaatgggacgatttaatcaattctgtttattaaaaatttggagggtttatttttgtttaatctactccgtaccttcatggccgtttacgaaacacgcagcttctccttggcagccacgcacttattcaccagccagccaactgtgtcacaccatattcatcagctggaacatcaactaaaaacaaccttatttgaacgaaacaaacgcagtgcgacgattcccacagtagctgctgatattttgtatgcctttagtggcaacatgctggctgagtgggaaaaaacgcaggaagcgattcaaaatagtcaaaaggatgccattgttgacctgcatattggcgtatcgcaaagtgtcgccgctgttctattttcccgaatcgcagcggctttaaaaaaggcttttccctacttgcaatatgatgtcgccgtgctcaattccttgcaagttgtcaaacagctggaaggccaacatttagatttaggctttattgaacaacctttaaccttaaagggcgctatccgaacaaccctttgtacggatcaactgatcgctgcaggttggtctaccggcacttggattacccgcgaagaaggctctgggatgcgctattacaccaccgcttacctacaagcagccggtatttcgccgcaacacatgatgaccgtcaataacaatgccatgctgctggcattggtacaacaaggtgtcgggcaggcacttttgtcggatcaagtcgcactcggcaatgctccggcacaagcaattggcccgcaatttcaacggcatttttacttgctgcaaaacccaaccgccaattggccccacaaacaggccatgctagataaaattgttgaagcagctcgcgcttcggaagtaacccgctgatggccaagctgctttggatgactattaatcagacagttcttgagtagcagttgctgtttgcttgactgttttagctgtaagccgcaaaaagtttagataatggccggtcacaaatatcagcatcaaactcgctacaagccactcaccccactgcaacacgctcaacaagttatgcaccaaccccttgctggcaaagatagcaataaagcgggtcaaagcagttgcggaaatgacgagtggaaaggtgaaggcggcaaaactcggataaaacgacagccgcgtatactgtcgaatgctgaaaagggtcagaaaatacaggcactgtgcaaaaatcaacatgccggttgcaaatgccaaattcggatgcgtgaagctggccagataaccggtcaggcaaagcgaagccggtgcggcgatgatcgtcagtaagggctgtgttgcctcaggcagcggtattgtcctgacacgatgcagcacaaacggaaaaactgccacgtagatcacaaatgcaagccagaaaaggggctgcccaagtgctggcacgaattttccactggtcacgggaatgacgccgataccgacaaaggtgacaaaccagctcggataaatcatttgccattctttttgttgcgggagcaaatgccgtgaaacgaaaaaaatcattaagccaaaatggataatcactgctaatacccagatgacagtagcgatccccaccggcattccccaagcagttaaataagtgcacaagatcatcaaggtcatcgaaaatgtcggcgacaccgatgcgatgatcggatcctgtaaacttttagctgcgtgtaagggagtcaggcaaattttcagtaaaatcagtccaaacagcaaagcagctaagcctcctgttaggttccctactaattgccaacctgccagtttgtatagattacccaacgatgccaatcccagtgtcagtcccgccatcggtaacggcactcgtttcaaaaatgatctcataactgcctccttatattcttgctattaagtgtagcaagaatcatcgtcatcggctaaattgatcttttgtatgattaacattcacttattgaatcaatcatggtgacgatcatgcgaccaatctaggctaaaagtttcttgccatgccaaactccgcaatctccggccagatgaggatggaacgcgtgacggcgcttcgagcccaaaaagcggtctcgaagtcgcctaacaacatcagcgacaaagcccggtcgctgtgttgtttgcacagctgatccccatccggcctacgattgcttcgccttggcactgggatctttaaaaccccaataaatcatttatgagaaaataaaaaatgaacaacttccaattgcgaaaattgttcattcttatttgacgcttatgaatgatgtcctaaccttagtttggaaaattctacacgagcaaaattgttgcattgttgagcatatgcaacccaatcgaataacgcatgtctcttgttcgcaagtaagtccaagcaaggacgccgccaagcgcggcatagatgaagaagttataatccacttttccggccacatgtgcaaagccgaagactgcggcactgattagcacactcacccattgccaggatcgctgcttcaaagagccaaaactgttcatcaagaaaccccgaaatagatactcctcaacgattgggccaccaacaactgctaataacttgattgaccacggatagtttttaactaaatcaagcaggttactttggttggcagcttgaggcgcgtgcatgacttgcgtgagcgtcacgttgatgagctgaatcaaaaatagcaatccgataccttgccagatcacgctagaaggatgagccaccgccagcgcaggttgttggcggtaaaaatgtcgatagcagaccatcaatgcagcaatcagtgcaccgaatacaaagaccaaggcaccaatggccccataggcaccccacgtggcctcactgcggatcaacgcaagttcggcagacgaataggcgataaaacctgcagcaacgccaacaagttggacaaatgagcgaagaattttcatgaaggcaatcctttcttggcatgtttgtctttaagggtaacattttagaagccagggtgcatggtgaaacatagccgtgaagaggcgtgtcatgcttagaaagtgaagcataaggtcccaccataacgcgcgagtcgtcccaaaaacctacgcataaggagcttagccgtaataatcaaagcccgacctcacgtccaagaccacatactttccggtttctaaccgggttggttcgtgctcacaaaaaaacctgacagatttaatatctgtcaggcgcggtactatcagccgtctatcggattcgaaccgacgacctcatccttaccatggatgcgctctaccgactgagctaagacggcaaatggctgtgttgtttaaaaacaactgcctaattaatgtacactaaatccccatagctcgcaagtcctttttataaaaatgtagcgtagaaagcaaaaaaatgcgcattgctacagctgttttaactggccatgctgtcctttcataaaagagccgccttgccttaccgtctaccgtgccactcggctttgaactcggttagaaaatcttccataacctgttggcgatgcatcgccatttttttggccgcatcggtgttcaattgatccttgagtttcaacagtttttcataaaagtgattgatgacggtgccttctgttgtacgatactgagccgcggttaagtcagctcgtggtggtaaatctggatcatacatccgcccaccatgtgcaccgccatacataaaagcacgaccaatgccaatggcaccaatggcatcaagacgatcggcatcctgaaccagttgtccttcgaccggcaacgattgatggtgttgtaagtttgctttaaacgacatgtgatcgataatcgtcaataccatttggacttggtcagcgcgcatgccagcgtcgaccattgcctgctgggcggcggctttggctattggcacatctgtaaccaatttatcgtcataggtatcatgcatcgtggccgccgccaacacaacggctgtatcagcctctggtgtttgcgcagctagttgttttgctgtcgccacaacccgctgaatatggtcaaacccgtggccactgtgatcttgctcagataccttttttgcaaaggctgtcagctcttgccattcgatcatgaatcgttgctccttttcgttgtccaccattcagtcacccgctatgtgattttgttaacaaattgagcttttttctgccgtatttattgcgtcaatcaacctcaatccttcatactaaaagtatacagaggttatgaaaaaaagggggagcacttttatgaaaaagcaatatttggcagccagtcagtcggtgaatcaattcaaccgactcttttcaccggtttcaacatcggagattccattgaatcaacaaaacctgcttttctggatggcgaccgatgccacgccaagaacaccaacgagcttggccaaagagatgcacgtcaccaaggctgcgatcaccaaagccagcagcccgttgattgaccgggggttgcttgaaaaacaacccgatcctgaagattgtcgcagcttcaagctcgtgcttagcgaagaaggtgagcaagcaattgaggatctcgggcctgaatacttgggcaacttagaacgtctctatcatgaacttggcgagaaaaagtatctgaagttgatcaaacttctcagccaagcaactggcaccttggtcaccgaataaaccggtcatctcgtggcacaaacacctcatgaagatcaccacaatcaagcctgacgctcagttgcgtgaggctttttcagttgactgggcgacacaattttgtcgccgactgttgccgtttttctaggagcgttacaatgacaatatcaggacgtagctagcccgattttgtcagtagccggctatgtctatctttttaaaggagtggtttgatggcaattcccgatcatatcagtgttcgcggcgcttacgttaacaacttgaagcatctcaatgttgatattccgcttaacaaactggtggcgatcactggtcggtctggttccggtaaaagttcattagccatgggcgtgttatacgctgaaggtatgcgccgctacatgagtgctttgtccacctacacccgccggcgccttggccaaacaagtcccgctgctgctgactcagtacgccacattcctagtgccatcgctttgcggcagcggccaaccgttccaggcatccgctcaactgtcggcacggccacagaagcgctcaacgtcattcgcctcatgttttcccgtctcggctcgccggtttgtcctaatggtcaccgcgtgtcgccaactctcgatattgccaaggcaatggatctgcccaatgacggtgaaagcggtatgggcatgatcacttgtccgacctgtggcgtccgtttcatggcttttgctgctgaagatttcgccttcaattcatctggtgcctgcccgacatgcggcggtactggtcaagcgcgcacactggccgccaaccggctcatccctgatcaagcactgacaatccgtcaaggtgccgtggcctcgtggcgcttgcccggtcgcaattttatgccttttgtcgcacaagcaatcggcattgatattgatacgcctttccaggacctgccaaaagatcagcaagaacaggtttggcacggtgaacgtaaaaaatacgccatcaatatccccagcaaaaccggcaaaatttttcatatggaccatgcccagtacgagaatgcctttaatgcggtcgaagattctttagcgacgaccaaaaatgaacgcgccattcagcggctgaatcgcttctatgaatttggcatctgcccgacctgccatggcagccgatttgccccgaaattattgagccagcacctagtggatcaaaacattgctcaggttagtgatatgactttaacgcaattagccgcgttcattcccgaaatctatcactggttgccagcagatatgcagtcactggcgcacgatattatccaagaactgacgcaattgcttaagcccatcatggaccttggcctcagttacctgaccctgagtcgagccgcggcttccttatcgactggtgaattgcaacgcattcagctcagtcgcacgcttcggactgaaacgaccggcgtactttacgtccttgatgaaccgtccatcggtctgcatgctgcaaacgtttctggattgctagaagtcatgcacggtttggtcaatcaaggcaactcgctggtcgttgtggatcacaacaccgccatcattgaggcagccgatcaagtgattgagattggtcccggtgcaggcgttgctggcggccgactcattgatcaaggtagccctgaagcgatcagtcatgatacccattcgttgattgcaccctttttaaccggagcggcttccttgattgttcgcccgcaagctggtgaacaagaaattaagcaaaccaaacaactgcaattaaccgtaactgatcgatttaaccttcatgacctgcatgtccattttccagttaactgcttctcagtggtatccggcttttctggtgctggcaagtcaactttgatttttgacgccctagtaccagcgctgtcagcaactgctgaccaaccagctccagcatttgttcgtgatcttgaccgcggcggcctgcgccatgtagttgcgattgatgccacgccagtcggtaaaaatgtccgctcaaccgtcgccacctacacagacattctcgaccatctgcgacaccttttcgccagtttgcctgatgccaaagccaagcactatacgagtagccatttctcttacaacgtcaaagccggcgcgtgcccgacatgcggcggtaccggcgtcattaacttagatatccagtatctgcctgacatgcagcaaacctgcccgacttgtcacggccgtcgctacaaccccgaggttctgaaaatcaaatggcagcagcacagcatcgccgacttgctagatctggacgtggactccgccttgaccgttctgaaagacgaaccggctattactcacacattgcaaaccctgcatgacatgggcctcggttatttgcatttaggtgaaagtaccccgacgctgtctggcggtgaagcgcagcgcctgaagctagttgcccacatgggacgctcccaaaaagacacgctttttgtcttcgatgaaccatcggtaggtctacaccccttggatgttcaaaccttgatcgctgtttttcaacggttgctcaaaaccggtgcaacggttattgccatcgaacacgatctagacgtgatcgctaacgctgattatgtcttggatctcggaccaaaaggcggtgcagaaggtggccgcatcatggctgctggcacaccgcaagcaatcgccaaacaagggaaaggtgaaactgccccttacttggcgactcatctggcggcctttcacgttaagtaggcttgacaaaaagagatgcctcggaaagtgataaccgagacatctctttttcatacatcaactttaaacgttcaagatcgaatcaatgtggctgatttcttctgcactgaaggtcagattttcggttgccttcaggttgtcttccaaatgatcaaccgaggtggtcccgatgatgacactggtgacaactggatcacgtaacagccatgccaatgccatttgcgttaacgtctggccacggtcatgtgctacttcgtttaactcgttcagcttcttcacaaccgcgtctttcccatgggcaaaagtggcttggttggtcggatgaattttgaacgtatccggaataccattcagataccgatccgacaacaagccttctgaaagcggcccataagcaattaggccggcaccatcggcttgaagagccttcgttaggccagaagtttcagcctcacgattaaacatgttgtaactgaactgattcagcacaaatggcgtatgcagatctttaaacatcgcaatcgcatctttggtttgctgggtatcaaaattcgagatcccgatgtaaagtgccttaccatcacgcaccgtctgatcaagcgcattgacagtttcttctaaatcaaccgtatcatcaaagcgatgcgcataataaatgtcgacatagtcaagctgcaggcgtttgagtgaatcattcaagccttgaatgaccgctttgcgcgaagtcccaacgccatatgggcccggatgaatctcataccccaccttggtgctgatcaccaattcatctcgataagccttcaaatccgttgctaaaatttgaccaagcaaactctcgctgctgccaaaaccaggttcatgatcaccattaccatagtgattcgccacgtcaaaatgaaagacaccatgatcaaaagcgtctaaaataaccgaacggcgtgggccaaatggatcaagattgccataatgctgccacaagccaagtgaaattgccggtagcatcaaaccggttttcccggcatgacgaacaggcatcttgtcataacgatcagttgctgcataatacatgacttttccccctctacacgttcacgagtgcagaaacctgcatacaagcgccttgaacgcttatacgccagtttcggccgcaccagctcacgctttgacttaaacgcgctcaccgacccaggaatcatgtatacaagccctgaacgctatggtcaaaattcaaccatcgtattcaagccaatttgcataaggatttctaaccgggctgtctcacgctcataaaaacgtttaccatcttctatggtggcaaacgttggcccaacaagcaacttaaaaagtcaattttttaatataaaactacttatttttcaaaaaaatcgttcaaaaagttagctacaccatcatccacattggcatctgtcatatagcgggcagtctgcttaacctgtggcacagcattttccatcgccacactaataccagcagccttcagcatgccaagatcgttgagaccatcgccaaaggcaatcgtttgctccggaccgattcctgtgagcgtctgcaactccttgacggccgtggccttatcaatatgtttaggaatgagttcaaggttagtatgttcagaggctgaaacatgtaaaacatcctgtgcttctaacgctgccttccccttagccaatgcttccgaatcatgcgggccaaaaatgatcccattcgtaattgcaggtgcatgtgctaacaaatcatcaactgatggtaaggctacaacgtcaatgctcaccgagctgggggcaaacttgcgtgcagctgcttcaatggcaggcggcactttacctgtgtaataaacggtatcatcgctgaaatacaaggcgttcaggcccaactgatcggtcacagtttcaaccgccgtaagtgccgcttgccccaaaacatgatgcacccgctcgccggaaaaatcgtagacagcaccattcgatgcaataatcgaagcttctggttcgaattgtttggccacaacctgcgctaaagcgtgcatgcgcccggtggcaacataaaaagaagcgccgctagcaacggcagctgcgatggccgctgccgttttgggcgtaacgtcatgatgattggcggttagtgtgccgtcaatatcactaataattaagtatcgcggcataaccgttcctttctaccctaaggacacaaatggcgaccgatcaccatcggccgccttatttgttaaagtccttgcggtaatccgtcaatttgatcagcgtaccaatcgttccatggtgtttcaggtgcgccttgcgcattaaaagttaccttaacttgcttcaaaaggtccaacaagttaccggatcggttagtcagaagaccggctgtcaattcctcgcgagtcagtggttgattatcaagcaagtaatgattaatatctgctagattcccctgcgtatcaatttgggaaaaaacatcgagaccggcgccgaagaagcgatccaagtagaactttgcaaaagtttccaatgctgtatgttgtgctgtttcatttaattgatcaatcgttgtgttgcttgctgccataactattttcgtcctttctgctttattccattataaccacttttggttgcgttttggaaaacatcgtcccacaacgatcacaagtttcacataaacttacacgttgccgtcgaccaccattttatgagtgctcctggtcatattcattaatgaaaagatagtgtttgatgacatttttataggaaatcaaaaatgccataaaatattcgtcttttttgaaattttacgactttccccagtttacaattcaagtgcaacaccctgacgactagaccataaaggccatgaagacctattcttgttagtgctagctaaacaagaaagcaggaatcttcatgacccactctcagactaacacccacaagcattaccaacaactcagttttagcgaccgtgctacaattcaggcccttcaggctgctggtgacaccgcgaccgtgattgcacagaagcttcatcgcagtaaagcgacaatctcacgagaaatcacgcgtggatctgtaactcagctcgactcgaagcgtcactcgcatcaagtctatcttgcggaaactgcccaagccatgcacgaccgtaaacgcgatagaaccggtcactacgcctttcttaagaccggccgtgcgttcttcaaggctctcgccagggagcttactcgtaagccgcgcgtacacagcgttgatagcttcgtacacttctatcgcgaccagggcaaggcttgcccttcaacgacaactgtctatcgctacatcgacgccgggctgcttgagctagacaacatgacacttcccaagaagctccgacgccgcatcaaaggctataagaacgcccacaagcgcaagaataagaagatatacggcgactcaatcgagttgcgtcctgcggccgtgaatgaccgcacaggcgtgggacattgggaaggcgacttggtcaaaggtattcgcttagctgatgagccagcattaatgacgctcacagaacggtacagccggactgagatcatcgtcaagattcctgactatcatgcgggcacctgccttaaagccttgcaggacacgatcgacgactacggggccaaggaatttgagagtatcacttttgacaatggttccgagtttgccaagttatcagagattgttggaacccagatttacttcgcacatccgtactcgccttgggagcgtggcacaaacgagaacgccaatggactgcttagggaattcttcccgaaagggaagtctctcagagcaattaccctggttgaaattcaagcagtccaatccgcactgaaccatcgtcccagacgtattctgaactatcttcgcccatgcgattactaccgatgcatggcgtaacagcctagaccactatcaagaattcgttatcatcgttgcacttgacttgaaaattgaggaattttacgactttggtctcttgctattatggaacggttgttatagtatgccaaatatgttggggatccgtgaaaggctggagattttatggaaaaagaaaaattacatctcggtgacgcggttgtttgtcatgtcaaagaagatatggaagcaccttttaccggaaaaatagaaaaggtttatgagaactcggcgctgttgagtattaccgattatgctgataaagaccggcagaatgccgcagagctcaactttaagattgtcgcaaatttccacgcgatgactcagaacctcggcggcggcactgtcttggcgttcccgccagaaccagccgaagagccaaaaaaataaacgttccaatcacattgtctcacaatatcactggcatctcgtgccagtgagtggttgttattatttacttagggatcttcaactcaaacaaacaaagtcaaaccggtcgacaggacagcctactgatcggctttttttagttgatacccaagacaactttcatggtcattcatgaaaatcagcgtaaaatgagtcgcaaacaatctatcgcaagagcgcaagccagttaagctcgaagtcatatatgcaggtttctggcctgtaaacgcgtttaagggagcgaccaacatgaacgagaaaccctatccagtccacgaaagtcttttgatcggcacactgctcacagcagctgctggcagttttgatgctttcacctatctcttacacggtgaggtattcgctggcctgcaaaccgggaacgtcatcttgttgggtattcatctcggtcaggcgcaatggactaccgctgtccgttacatggtaccgatcttcgctttcatgttcggcaccatggccgcccgcgcactgcaactgcaggctggcaaaaaatcacgacctttaaccgaacaacggtggctcattcaatacgaaatcactttgattcttatcgtgacattgtttggccactggctgcctgatctagccgccagtgctttggtttcactcatcgccgccgcgcagctacaggaatttcgccgtttaaaaggcggcccttttacttcactgatgatgaccggcaacctacgcaccgcggcgcaaagcctttatgatggcttcatccgcgggcagcaaaaaggccgtaaagacgcggccacaattgggacgattattttatcatttgctaccggtgctgccgtgacaggtattttaacgaccctgatcggaacttatgctttagtaggcgccgctttgtgcctcgtctggattgatatcattttttggcgtgatcaggttgagcttcactaagccacttaattagcggcttgacctgcatgcaagaaactaaggtcattgaaatccgtcacagtaaatcgatcattttcccacatcagtttcgtcacgctagcattgtctagcatttcgcgaccatcaatgttgtagtgaacataattcaaccacatgagcgccgctgtcccgtgtgagacgaccaatactcgctcccagtctttggcgactgcctctacagcaatcgcacgcaaagttcgattcaagcgttcctgcaccatgcggttcgtttccgccttgttcgggtgctgatccatattcgccgtaaaagctgcatctgccgtctgggccaacgttatttcttgattggccaatgcatcgtgaaagttagcaatccccatggtcgctaaggaaaaatcatttgccagttgaccttcgaacttgccgtaattttcttcacgcacccccatcaaggtcgtcaccggtatcggttcatccaaaccgctcaaaacaaaatgggcagtatctaccgcgcgggttaaatcgctggcaaaagccgcgtcaaagtgaatgtttttagtcttaaagccttgacccaaagctttagcgtccgcaatgccttttggcgtcagtgccgaatcggccatgccttgcactcgtttttgtacattgaattctgtttgcccatgacggacaagataaagcgttgtcatgtctagttgactcccataattttcatttttcttgcgacaatggtttaagccagtttcaaataatctgccaaatagtttgccaccccatcatgctgattatcgttaggggtctgcgcatcggcgattgcaagaatcgcaggacgggcatttttcatcgcaacaccatgacccgcaaactgcaacatatcaagatcattcatgtcatcgccgaacgcaatgatatgcttttgatcgattccgtattggcccgccacgtaggcaagtgcccgtgacttgctggtattcttacttgtcacttcaagcgcagtgtattcaccactccaagcaccccacgttttggccgccaaatgcggatacaatgcgttgacttgttttgaaactggatcaaaagttttagccgtcataaacatcgtgaccgaaataggcggctgccgcaaaccttgctcatctaacagcgccttaggatgcggacgatctggcaaaaacggaatgttcgcgtatggtcgatcagccaccagcaactgtttcccttctgccaccataactttaaaggaaaagtcgcgttttagctgccgtaacgacagtgccaccggaatgggaatggtgacctcttgctcataacgccagtgttggtgcgggatgtgaatcagcgcaccgttgaaattgatcatcgggccatgaagctgcaagtcgtcgtagaaatgttccgaaatcgaatccggacggccggttgtaatgacaacgagatgtcccgcggcttgtgcctcgcggaggacggcaatcgtgccagcgcttaattgtccatccgcattcaaagtcgtgccgtctagatccagtgcaataagatagcgttccatgcagcagcctcttttcaaaattttttcttagtgatgtgtctagccatctaaaacgcgttcccctacaatagatagcagttagaaagcgaggaaatcatggctgaatcaattgtactttatacagatggcggtaatcgcaatacaggaaatcaggcgggtggatcggttcgccccacggataaaagcgcgtgggccgcgttgctgatctacggagatcacgaaaaaatgctatctgacggcgactatggccgaacgaataattatatggaaatcatggccgttattcaaggcttaaaagccctcaaacgcacagatattcccgtcgatgtttattccgactctgcttacgtcatcaacaccatgcagcaacgttggtgggtaaaatggcaacaaaacaattggcgcaaccatggcaaaccagttaaaaatgccgagctttggcaggccttgttgcaccaagtcaatcgctttgaaacgattacctttcacaaggtcaaaggccatgccaccaatcgcaacaacaatcgcgtcgatgcggccttgaatcaaaccatggaccagcttgacgatcatgtttaactattttacccctgatggccgagaaatgcttcaccataagtctcagctaagaaactatgaatcacctgctgcatgcgctgcacagaaggtgatttttttatggtcggattaatcacgagacacagcgtccgctcaaagggctcagaaaatgaatacatattgacatcgccaactaacttctgcaccgctagtttcggcaaaatgcccatccccaaacctgattccaccatcgacagaatgctttggtcatcaatagaataattaattgcattgcttgacacatggtagcggtccaacgcatttttggtatctcgatcatagtcaatctgctgcaaaatgaagttctgcttatcgacatcggcctgtgtcactgtgcggccgtttttaggcttgaattgcttgggcgtgatgcagtagatgggatcctttaataacggctctaccacgacgcccgggccaactggtaaggaggaaaagccaatgtcggcagttcccagtcggaccgcctcaacaatctggttaaaagtgccttgcaccacgctaatttcaatgtgcggatagcgctttttgaagcggcggataattgttggcagccaattcgtcgaaaccgacgagaacgcaccaatgcggatgcggccggtattaaccccattaatgttgtccgcaacctgcgtcagctgctcctcgagattctggatgctttgaataatcggcagcacctgcgccccatcttcagttagcgccactcccgttcgattacgaatcaagagtgggaaacccagttctgtttccagctgactgacactatgactcacggcactcggcgttacattcagctccgccgccgctttcgctaatgtgccgcgctccacaaccttgctaaaaacttcataagaaaagttagccatttgcccctccttgatgtgacaccaactgtcacttcgttgtgataaatccttttagactaggaataacagctgttcgttccttttaaggtgaataaaattcatcataaactgaaatagttgagctttactcaatcatacaagccgttttacactagtgtcaataagaaaacgttggtacttcaccaaagcatcaacgtcataaagacgtcggcacccgttttaatcgcaaacgtcaaagggggattcatcatgaaattcgcaacacgtactcaaaaaactggtcattcaggtttagaagatctatttgctgcttctggtccaaatgtcatttcatttgccggtggttatccagatcgcgatttattcccgacaaaacaacttaatcaggcatttagtcaaaactttacaagtggcgatagggaattgcttcaatatgccagcacagaaggttacgaaccattgcgtgccaagattgcagctcgtctgcagacgactgggatgcaggtcgacgccgatgacatcatgatgacccaaggcgctcaacaaggcatcgatctagtggcgcggttaatgttggatccaggcgacggtttggttgttgaagccccaacttacttaggtgcacttgctgcttttaacgcctatcaacccacctattacgaagtaccgatgcaagctgatggcatggacatcaatgctttacaacgcattctaatgagtcgcaaagtcaagttcatctacaccgttcctgattttcaaaatcctactggggttgtgatgtccttggccaagcggcaggcaatcattcgcctcgccaaccagtatgatgtcatgattttggaagataatccgtatcgcgaccttcgttatactggcaaagccttgccgacgatcaagtcactcgacacagaaggacgcgttatctatcttggcagttttagtaaaattctttctccaagtctgcgcatgggctggttggtcgctgcgcccaatcttttaaaagagttgctggccttaaaaggcggcagtgatctggaatccagcaatctggtaatgcacgggatcaatacctatatggaaaataacgatcttgatgcacatatcagggaaattcaggattgctatcgtgagaaaaagaatgccatggtggcggcgatgaagcgctatctgccagaagaagcgcacttcactaatcctgacggcggcttctttatctggctcaccatgccagccggcttcgatatgggcacgttcatgaaagaacacctattaccggaagccaatatctcctatgtgccatcaaccaatctatatgcgacagcggctttgtccaacggtgcccggttgaacttcactggtcctagtctggcgcaaattgataccggcatgaaagctttgggtgcagcattaaaggttgctctgcaacacaatctggtagccgaacaagcctaggctataacgcgctcaaaaaagctcggttaaccttaacaaaatgacaacgtaacgatcacattttcgtcacactttgccggtagtattaacagcatagaagtgagccacccactcattcctaaaccccaacctaattttcatttttctcctccaaagaaaaatcggtgattggcccccatccgatcacccaataacaaaaacgcccgctgcgatggtagcgggcatttttgtgttttgaagacaaaaaatcgccgcacactttctcaaagtgtaaacggcgattaatcaaacatccatcagttgcttaaactaaccgatcaaccccgaagctggcagggtcatctttcttgtcggctttcttttcagtatcagtggtcgttgtcttttcggtctttttatcaccagatgcctgatcgtctttcttatcatcctgctgcttatcggtttcttcaggcttctttggcgcaacttgttcacgaatcttttcttcgatttccttagaaatttccggatgttcatccaagtagtgagatgcgttgacaagtccttggcccaaacgttccttgccatagttataccaagagccagacttggtgatgacgtcaatgtcattgtctttatcggttgccaagttaatcatatcggtattgtgttcaatcccgtgaccaaatgacatcgtggtttcaaccgatttaaacggcggtgcgaccttattcttagtgactttcagtttgctagcgaagccgacaacatctttgccgtctttcacctgctgcccacgcttgacttcaatccgtacagacgcatagaatttcaaggcacggccgcccggtgttacttctgggttgccaaacatcacgccaactttttcacgcaattggttaatgaaaataaccagcgtattggtattattgatcgaaccggccatcttccgcagtgcctgcgacatcagccgggcttgcaagcccacatggctatccccgatggcaccttcaatttcagccttgggaaccaaggctgcgacagagtcaatgacaacaatatcaacagccgctgattcaatcagcatttccgcaatttcaagcccctgttccccagagtttggctgagacaacagtaagtcgtcaatatttacgccaagttccgccgcatacttcgggtccatcgcattttcggcgtcaatgtaagccgccttgccgcctgatttctgcaattcggcaatagtctgcaacgcaatcgttgttttcccggtactttcaggaccatagacttcaacgattcggccacgcggtaacccgccgacaccgagtgcaagatccaaggataaaatgcctgttgagacgacatcaaccttcagttccggtcgatcgcccatcttcatgacggcaccttcaccaaaggctttcttgatcttctgaagggctttttctagttcggtatcgcgatctgtagcatcggatttagtattatcattctttgctgtcgttttcttagccatacttgtctccttaaatgcgctcactggcgcaaaagcctgtgtgtaagcaccttggtcacaatagctcaaccagaccacttatatcccagtctttaaccatgccagttcacgctttgtcttataaaaatgcgccagcagttcaaaaaacctgtgcacgctattttaaacatatacatccgagtgtcaatttacgctgtctccattatcgaacatgcgtttgttttttgcaagcttttacgttaaaaaagtcatcccccaaaatcgtatgcaggtgactgctttattttacctgatactgacacctttttggtaaaaatgacgcgttatttatggcacacaagcatggtatgatgaggcgattggcttgatactacaaaaataggtaaacgaggaaaatgaaatgatgttcatgggttctattgtcaatgggttgacgattatcggtggcgggctcttaggcttgattctccacagtattagcgatcatgctaaagatactgtcaccaaaagtcttgggcttggtaccttcgcattgggcattcaaatggccttgcagacaaaaagttttattgttatggtcatcagcctttgccttggcggcttgatcggtgagtggttgcatattgaagatggcatgaaccacctcggtttgatgttggaacagcgctttgcccgcggcaatcagcattttgcggaagggttcgtgaccgccaccctgattgctgtcatcggtgccatgggtattttaggcgcgattcaggcgggcgtttctggagacaataccacgctatatactaaatccgtcatggacgggttcatggcgattatgctgaccgcgtcactcggggttggcgtgatcttttccgcgttgccagtgatcatttatcaaggcacaatcacactcttcgccagttttttagtccaattcgttcccaaggcattgatgacgaacgcactccgcgaaattggtgcagtcggcggcttaatgatcttggggattgggttaaacttgatgggcattactaaaattcgtatttctaatctgctgcctggcttgctagtccttgttgcgatcctaactggtcagtattttctatgattaatgattgaaccatttaggaggaggctattggcagatcataaactgaccggtttgaacggttgtggtgataaatcagagcagatttttaccaaaaaaacgaccccctgcttcactggcatgggtcgtttttttttggtaaaagtgccgattatgattcagaaattcggaatgagccgctgcttttggcgatggaaacgatagtaaaccagtttgcaatgccaatcacgcacgacacccagcaagtgcgaattggcatcataataccagtagcgcagatcatcttttaggtactgctgattcaaccatgcatgatcgtgccgcaagaaagtataactttcaagcatgtcctgctctcgccaaacatcaggcaataagaattggctacgggtaaaccgttttaaaaaccgatctgaataataaacccgctcaatacgaccgacaaacaatgccgtctcgcctttacccacatatggcgccatgggcacaacaatcaaaccaccgcgtaaacgttcaaaccagtctgtttgctgactgacgttaatggcacgtgtgacatccttgggtaaccgaaaatccaatactaaaccatccgggcgtcgaacccgagcaacgatgtgtcgttttttcatataaagttcccccaaaacaagtgagcgcgagccagcgtgggtgaaaccggagtgtaagcggccttgggcgtgatggtcgcactttgaccattgcgaccaaggtccttacacgcaggttgcagcgctggtgagcgcgttataacttggcctataggcgacttgtattaatggcaaaagtttaacactaaatgacctcatctgcattgaaaacgcttgttctgtaaagcattgttctacgctcttttttaaatgtgaacaatgtcgccacaaaacgataaccaattgttggatttgtcttcacatttcgttcacaccctgccggtagtataggaaacatagaaatgagccacccactcattcctacaaaccccaacccaactttttcatttttactcctccaaagtagcaagcgtcgatcgtcccccaaacgatcgcaacaaaagggccgcccacccagcggtcctttttgctgcgcccgatcacaagcaacgtgaaaaattcccaatcaaaaatggcctcctgaccgaacgtgtcagaaagccattttgattaattaacgattaaatagatcatacaatgcatctggtgtctgtgctgcttggaaactcttgacgaagtcttcgtgcgtcagcaactttgctgtattggacaagtacttcagatgactgccgctgtcatgttccgggatcaagaaggagatcacggcattgacaggcttgccgtcaaaggtttgccactcaacaggttgcgccaagtgcaagatcaacatagccgatcgtttgatggtttcatcttgagcatgcggaatggcgatccctttttccattcctgttgatccttcctcttcacgcgctacgtactttttgaaaatggcgtctgcgtcggtggcaagtccatccttgaccgccatgtcagctagataatgcaaaacatcatctcgcgtcttagcaggtacgttgacctcaataaattctttattgagaatttcgccaggatcaaaactttgatcatcatcggtggttggtgcaggttgattgcgagcatcgtcgacagctattggggcagcagcgacatcgtcatcggcagcttcggttgctaacgccgcttcaacaacaccggtttttacaccacgttttctagccgaccgaccagcgatcatggcaagcagaacacctgatgctgcggcgcctaccagaatccatgcaacccagagaaatggcttattgaccaacggcaacacgatgaagccgccatgtggtgcaggcacctgaatgcgtgacatgtaagtcaaaacagccgcaattgccgaaccaaccatgaatgctggaatattcattaacggattcttcgcggcgaatggaatcgcgccttctgtgatatgcgtcgagccaagaagtgcattgacataaccagcactgcgttcatcgcggttataagctttcgggttgagcagaaccgaaatcgtggttgccaatggcggggcaatgcaggccgctgatacaccagccatgaagaagtaattgccttgtgccagtagtgccgtcccggtcagataagccgctttgttaatcggtccgccaaaatcagcggcacacatcacaccaacgacaatacctagaatgatcgggctggagctttcaagtccttttaaccaagccattaagcctaagttcatcgccttcattggcgtattaatcaaaaacataatggatccggcaatgaaaacgcctaataccggatacagaaaaatagcttttaacccacggaactctctgtcaggcatgaaagcaaatgccttttgcaataataagatgaccaatccggccatgtagccaccaacaatagcgcctaagaaccccgatccgttgccgccgttataagcaatcatgccgactgccatcccaacgatcaagccggaacgcttggcaacagcttcaccaatataagcagccagcactggcaccatgagtcccattgctgcaccgccgactgcattcagcatggctgcaaactgattgtattgagcattcttgggatcggcagaataaatgccccagaagaaggaaatcgcaatcaggacaccaccggcgaccactagtggcaacatgtgtgaaacaccattcatcaaactcgtataaattttgtttccgatacccgctgaactagtttcggtcttttcaccggcttcagccgtggctttgccacctttaggcatgaacaccgccgtatcgctgcttaacgcttcttgaatcagtttagccggttcgcgaatgccagcagcaactgggacattgaccagtggcttgccagcaaagcgatcggcgtcgacatcaatatctgatgcgatgacaactcctttagcgccgatgatttcttcttgtgtcaacggatcgtccaccccggtttgtccgtgggtttcgactttaattgtcaatcccattttcttagccgcttgttccaaggcttcctgcgccatgtacgtatgagcgataccagttgcacagcctgtcgcggcgattaaatcatactttgccattacttaaccctccatcttgcgaattttgatttgtcctaacaactcatcggtatttgaaaaatcagtgatccatgcctgtcgtgccgtgtcactgccagccgcaatcgccagtttcagcgtctctgccagatcatgatgctgatacaacccggctaaaaaggtcccaagcatcgtatcgcctgcaccagccgtgtttagaacggcaattttaggagcattgccaaccagcgttacatcgtgattcatgaacaaggcacctgccgcaccaagtgacactaaaatgttctgtgccccagcttccaatgcccgatgacctagcgtaatcatggtcgttaaatcagcctccccggtctggtggaaccaattcatcaactcaacatcgttcggtttcaccaacagcggcttgtaagccaatgcctcaactgcttcaggatacgcactgtcaatgatcaactggaacccatttttttggctcaatgcacccagctttaataaaaaggctggcgcgatgccttgcgcaaaactaccagacacgcataaccaatcgtctgaccccagcgtggttaattgttggtataattgatttaatgtgtccgcgctaatctgcggccccggattgaccaacttatactccgtatcggttgtcacaacccgcgcaaagacgttaatccgggtaaagccagcatccttataaaaatgatttggcacaccttgttgcgttaaaaagtcggcgatgtaatcaagcgtaaacccagcaccaacgccaagcgccgtattgtccacgccacgccgtttcaaaatgcaactgacattcacccctttaccattggcttgcacatcataactgtcggttcgattaaccgtatttggcgccatctgttgggttttaataaatagatcaattgcgggatttaaagtcagggtataaatcaagttaagcgctcctttgtgtcgtttgttttgcttatccttatgttaaccgctttcagccgaaaacggttttcagtttcaggcgaatctgcgccagtactgaaaatgcttttcaggaggttaaattcatggctacactcagtcccaccgaagcgtacctttgggattacattgaaaatcatcagcaagccgtcgttaacgcatccatcacccaactcagtactgcggccaatgtctctcctgccaccgttgttcgcaccatgaagaaaaaagggtttaatggctataccgatttccgtcacgatttgctaaaacgcacaggcgatgccgcaccgttcagcattcttgaccaagttgacgaccaaatcaaaaaggtcattatgcaaaaccaagtggaagtctataatacgctggaaaatttgaaggtttctgtcattgaagactcggttcaattgctagctaaggccgaaatcgtcctgattcttgcgcgcggcttatctgaatcaattgcgtcggaagtcactttaaaattgcagctcttaggtaaatacgccgagtttttcagtgatccaaatatcattcaaacgattgccggtcaggtcagcccgaaggcagtcgccattactatcacattgaatggcgaaaccccagagcttgttgctgcagcaaagactttggcggcgcgcgacattccgcaaatcattttgacaaccaacgcagaagcgccaattgtccaatatgccgatgagttattcgtcgggtacaaatccaaagccgcttacttcgacaaatatgaggtggcatcacgcctgccgctgcaagttatgagccgtattttgctggatagttatgttgtgcggaaacgtgggcagaaaagttaacggtcactagcaggctttgataacttgctcgtaaccacataaaaaggcaatgatcacttgagaaaacagtgatcattgcctttttcacttcatccaaccatcaactatgcttttggtagcggccgatgtttaaatagttgtgttgcagcgaccgcttgttgccagccagcgtataaattctcgcgccgggcttctgacatctgcggttcaaaccgcttgcccatcttgaaaatctttttgagttcatccgtatcttgccagaagccaaccgctaatccggccagaaaagcggcgcccattgccgttgtttccaaatttgccgctcgttccaacggcttgcctaaaatatcggcttggaattgcatcaagtaatcatttttagcagcaccaccgtcaacacgcaaggcggggacagcgatttgggtatccttatacatggtatcgaccacgtcgcgcgtttgataggctagtgcctgcaaagtcgccttgatgaaatcggttttcgtcgtgccgcgtgtcagcccgaaaaccgcaccgcgggcttcagcatcccaatatggcgcccccaaacctgtgaaggcgggcaccacatagacttcatcattactagttgacgcattggcggccatctcagtatctggtgactttgcaaccaaccccatttgatcacgcagccactgaatcgctgaaccggcgacaaacaccgagccttcaagtgcgtaattaattttgccgtcaatgccatacgcaatcgttgtcagcaaattgttcgcggacatggttggtttttcaccggtgttcatgacaataaatgagccggtgccataagtattcttaaccataccgggtgccagcgccaactgaccgaaaagtgcactctgctgatcgccggccatccctgcaatcggcacagcactgccaaagaagtgataagccgcgccttcgccgtatatttcggagttactatgcacttcaggcaggatcgcgcgcggaatattcagcagttgcaggatgtcgtcatcccaatccaacgtatgaatgttaaacaacatggttcgacttgcgttcgtataatcagtcacgtgaatagcgccaccaaacaacttccagcttatccacgtatcgatcgtgccaaacaataattcgccattttctgcgcgctgctgggcaccgggaacatgatccaaaatccaacgaattttagtcgcagaaaaataggcatcaatcaagagaccggttttctcatgaatagcatccccataccctgctttgcgcaactgttcagcaatgccattcgtttgccgtgactgccaaacaatcgcgtgataaatcggcaaaccagtctttttatcccagaccaccgttgtttcacgttgattcgtgatcccaagtccggcaatttgactaggctgaatcccggtcgaaatgaaggtgtctgcgatcgttgacaacacggcttcccaaatttcattagcatcatgctcaacccaaccaggttcaggaaaatattgggtaaattctttttgcgcctcacccaccatgttgccggcgtgatcaacgataactgccctcgtgctggtagttccttcgtcgattgccatcatatacttgtctgccatttctgtatccccctgctaatgactgtttccgctttcaattcagtataccggatgtaacggaggaggttaaggttcagatggtttaaaaaccccaccgcctcaagtttagccttattgcaacgattagatccggcatgctataatgaagatacaaagaggggcgctggtctcaaacagcactccctaacaagaccgtcaccaaaacttcgtcaaaaggtttggtgacggtcttgttattgtctaagatttgaaattgacatcgttgcgacgccttgatactgcatgctataatgaagacacaaaagggagcaccggccataaccggtactcccttgacaagaccgttgaagacggtcgacattcgtttaagcaatcaattaagaccgtcaaactctgtcaaaagttttagtgacggtcttttagtgacggtctttttctaccattagtcaagaaaaagctgatttgatcacaattctcttttctttgcactttgattttgaattgcacgctctacttgggtcggttctacctaagttttggcgtacactaaactaggcctcacagatattgactttctgaggcggtacaattcgtctaagcgagtggtgatttactattcgggcatgaatgttgttgaatcatacaactcgttgtttaaaatcaggtggtgcatgagccggttaaactgactcattgcggcgatggcaatttttctaccattagtcaagaaaaagctgatttgatcacaattctcttttctttgcactttgattttgaattgcacgctctacttgggtcggttctacctaagttttggcgtacactaaactaggcctcacagatattgactttctgaggcggtacaattcgtctaagcgagtggtgatttactattcgggcatgaatgttgttgaatcatacaactcgttgtttaaaatcaggtggtgcatgagccggttaaactgactcattgcggcgatggcaattttcttagtcccgtgggactgagcggattgcttttttcgtttgtagtttgcgctgatcagcgtcggttgatattgcgagacgctgataatgtttaggattgccctgtataaaatctttcgggcatacgggttcccacgttttctaatgtgcatttttgcttcgtattgtcctgactcatagcgaatcaagtcaattccaatataagcattaatcgcattggcactgtgaaaacgtcgcacgtctcccagttctgcgatcaagcatagtgctgtttttataccgattcctgggatcgaaacaaggagcggcacttcgctgaggttttctcccaaagttgtcatttctacgattatctgggcctttaactgattgatgcgttcaacttctttagccaaggctataacagctctgacagcgtgtgactgtggctcttttgccggcgctgagttttgagctaaggccaataaatggttggccagtttcatagctcgcttgaggcctatctttttagaggtctcggttaagatgatttctgtcagttcattctcttcgtgagacagtacgatcgctgggtgcggaaatctttgaacgatgtgccagtagagaacaccgtcagtcgagctcataaaatgctcgatttccggaaaggttagctggagcgctctatgcagacgattcttgttgggtacaatgtctttattaaactgctgatacgtccgctctagatcgtgtaactctgtataaactgggctttcctgataggttggcctgaagtgatttttgatcatcgctctggctaaacccaccgcatccagcgcatcagtttttgtatgcctgaattcttccatcactttctttgcggctaatggattgagttctgtatatttccagccgtctcgctgtagaaaggcacgcaaacgacgagagtacatcgcggtcgcctcgtatatgattaggggtgcgttgaagctattgagttcatcacttaatagcgaaaatcctaactgatctaacccaattttaaattgcttgataacgacgttatcaacaagtaccgctacattggcgttctctttactgacatcaataccaaatacacattccatacaacaaacaccacctttgaagttgtttcaccgattcactcatcccaattttcaatacacggcgtcttgcgccaacagactgcgaacgagtttcttggtggatcaagcgaagttgccagtttgatttacgacgtcaaagcgccaaaaagacctacggcatgtcaacttcaacaccactttatcaaaaaagaaaagtgacgaaccaagattccgtcgagtcttggttcgtcactcatgttagtctgtttgatgggtctgtactagaatttcggacagaaacataagagaattgatttatccgaaaggagtcctcaaaatgacctattcacgcaatcgctacgaccaagattttaagaaaaatgcggtacgtttgagttttaactcttccaaaccagttaaaatcattgcctccgaacttggtgttcctgaaagtgccctgtatcgttggcggaagctatataccgaagatggaaagcaaacgccgcttgcttctttagaagctgagaaccgtgccttaaaacgtgaaaatgccgaattagcattggagcgtgatatgttaaaaaaagccgctgcctactttgccagtctccagaagtaacccccagcgataagtatgcttttatgttgagggaaacctctgtttctgtggtaaggtgggcgcgtttgttagacgtatcaacgagtggttattatgcttggcggagagctttgccaaagcgaaacgccaaagaaaggcaatatcgtcaacgaatcaaacacttttttgatcaaggacagggcacttacgggcccaaacgcatctgcggtttattgcgtaaaaatggtaataaagcttcctatcaccgagttgcccgtctgatggctgatggcggtctgtattcaacgctacgttgtcgtcatccgaagagtttgaccgatagccgccttgctcgtcaaggtgattatcccaatctagtgaaacaccaatcttttaagccgtttgaagccttatcaagtgacattacacagacgacaacatcagaaggaaaagcttacatttgccaaataagggatttgaacagcaacctagtgttagctcatcaaatatccaatcatatggacacggatttagtcttagcgacacttaaacaagcccaccaaaggtgggctttgccagaaacgtgtatttttcatagtgaccgtggtagccaatacacggccaaagcagtgacaaagttggtcaaccaatatcattggcaacgtagcttctcagcattgggaaaaccgggtgataacgcttggagcgaaagcttctttgccatcatgaagaaagagctcatttatcagatacaatttaaagatatcaatgatctgagagcgcaagtcttcgcttacatcgagaccttttacaaccgcgtaagggtacaagcacgcttagactatcttgcaccagtagcatggctttccttgtatgaccaagcttcacaaaaagtcgcttagcaaactgtccgaaaaagtgttgacttcccgattgtctaggattgctaccacaatcgtgatgatgagcgcaatcaatgatagtatgaaaccaccaaagaccagcatcagcatcaaggcgtcagcaacggacaactaggcacctcccttcgtatagattttgatcatcgcgcataggcgaccacctcacaatacgttggatttgccaaccgtcattcactttcttgtctcatccattatgccataccaaatagcaaaacgcttagagtcgcaatgattctaggcgttttttaattgctcgtgtcaccgtggtagcgactgcttttgaaagcatgcaacagagctctctataagtagtaccagcgttattttatagcttgttcagcaaatatagcgtgtatagtcagtcctgtaacttcgcacattgacggacacttttgttacacaatggattgaagtcaatatttgagacagattttaagagacattcagaaccgcgtttaccttccacagctcaaataaatcattaatcgcgattaataacttatttgaaccctggaaagcattaaatcaggcggccatttggctcgtaagtgttgcaatttcaacttgtaagggggtctggtagcccagtgaactatgaattctcttcctattgtagaaagcatgcacatattcaaaaaggacggcagcggcagtttcataatcttcaaagaccggcactggataaacacattcctttttgagggaagcgtgaaaggattccattggcgcattatcatacggacaacccatacggctgtatgagtggcggatatgtagttcagttaaacgttgattgtaatcatcgctggtatactgtgatcctaaatccgtatggataatcaggtccccagtaatggttcgatttttaaccgcgctttcaagggtctttaagactaaatcagtagccatcttttttgagaacgaatagccgataatccgtcgtgagtgcaggtccatgatggttgataagtaacaccagccattacgcttcgtttgaatataggtcatatcagcggtccatttttgatttaaaccagtggtcgagaaatcctgcttaagcaagttgggacgctgttcaaccttggttttggaagccgaagccgctttccacttattgacggtaacggagtggatatccagttccttcatgagctgggaaatccgtcgtggactgcaccgaagctgcagtggttgaagttgcagattcaattcatggtggatcttcataacaccgtatcgctgcttaaattccgcaaagatccgcagaatccgttgttacaagtccgcatcttcggcccggcgttttgaaggtttgggggatcgataacgataatactgagctctggaaacaccgaggattcggcacatcttggttacctggtggtgatggctttcttggtgaatgtaatcaaagatattggttacttctgcgcaaggaagcccagggctttttttaggatttcgttctcctcagacagcgaagccagtcgcttttccatcgctttgatttcgtctggcgatttaccggattgagttttggcctggccctggatccacttatgaactgttgaatagccaatgccatattctctggccagttgggcagctgattcgccttgcttatataggttgataatgttttgtttgaattctttgtcgtaacgagttggcatgtaaaaattccttccttttgagagacgatttattcattataccctctcttaaaagttgtctcaggaatcagcttacatccagatcctgattcagtctttttcttctatcaaaagctcaatcagctgcgcaagcaatacccagctctcattgtctatggtgattatgagttattggatccagacgactcagatgtctttatgtatcggcgttttaccgatgatcaagagttgctcgttatcaacaacttcaccgatcaggaacaatcccgcccaattagcacgcgcttgcctaaaaacgcacggctaatgatcagtaattatgctgacgatcgtggtgacgttttgcggccttatgaaacacgcagctatcttggcgaacggcgttaaagaaccaatattcaatatctgtgacaaaaactaaagcgtcattttaacgcaaaagtataacgatggtttggattagaactctctgcaccacctaacctcaagtgacaaggccaatcgcttcaggtcaccacattggcccttatgagcggtcaaattttcaccttgtatgaataacacaatgaacatttcaacgtcacaatttcgtcacacctagtctgtagtattagcaatatagaaatgagccacccactcattcctacaaaccccaacccaactttttcatttttactcctccaaagtagaaatcgccagtcggcctcccaccggctggccaatacataagcaaacccgcgtatgaatgcgcgggtttttgtttggctttatttagcaataggcacaacttccctaggcagtttatatcattaagaacaggtattgtgagtttggaggggtattcgttttgaagaaaagaacatgggtgataacaatcacaggtgtcgccattttattggtgattacatttggcgtcatactcattcagaaaaacgacgcagaacgccgattatcattagggcgctcaagagcatcaattatgtcgacatcaaaagtgaaagcgtcaaagtggcaagtctctgtttcggaagcacaaagcaccgcaaactcaaaattttatgcagataaaacgtcaaaagatgctgcagcttcattagccattgtcgcatctgaagcaaatagtaaagcagaagccgttaatcatgttgacttcgataagttgagcaaaattgaccaagcaaaagcggctatctattacggattaggcaatatgcaatattttaacgacaaaagcgtcagtaattaccccggagacgctgtttattcgagtagtggcgttgatgtggtctttgtaaaagatatatccgcaggcattggcagtacaccttatttagtagcgcctcatctttctcaagtaagtgctgcagcaccagtattttcatacgtcgaactaggtatgcaagcagatggtcaccgacctgaaggattgacatatggaaaagttgatgacgacgccaacggctacgttcccgatcctggactccacaataccgttggcgtctcatttaaaacggtcaacgactggattaattcacatggaggtatggccgctgttcaaaaaatcaacatcaaccgttttattgactttgaccaagagtaatgccaattttgctagcaaacaactaaattgattctcgcaaatttagtatgcaaaccaaaatttaagggtgatgccaagggtgactcaaacataaagagcaatagcttagtcctttttactagctgctcaaatctgctatttttctgtatttgaataacacaaagaccatctttgcttcacaatttcgtcacacctagcctgtagtattagcaacatagaaatgagccaccactcattcctacaaaccccaacccaactttttcatttttactcctccaaagtagaaatcgtcagccggcctcccaccgactggccaatacataggcagacccgcatgatttcgcgggtttttgtttgactttaattaacgatggataaaatgctcccacaaggcaattggcagtctttttgtctttcgaattggaccacgcctagttctttctgtgttgctttaccatactaaagtgagccaaatcatgtgtaccagatgataccaaaatgcctttgcagggctgagcaatcaggaaaaggccattatactggctcttcgtcaagtagagttgatagatcttttgtgaagcatctaggccttaattggtctagatgcttttattatgctgctgccttgctgctcttagctctgaaccaaacccgttccaggaatatacgattgatgaaattgttccaattcgtatagccgtacgcagtgttcttaatcttcttgatgatgccgttaataccctcaaggaagccatttgagtactcatagcgtaatgcattgatgacttgtctcttgtacttctttaacgttttgatagactgatccattcggtttcctaatgatcgatagctctctagtgcggctgcgagtgctgacgcatcacgctttctaaccgctcctataatctcctggtagacttcatatgctgcccggaactccgggctcaggtctaagcacttggcgaccagatttacagttgtttcgtaatagccgacgctggtgtgatacgtgggttttattgcttcaagttcgttgaagtccttaagaaagattttccactcgcgtttcatgaatcggtattccttgctacgcttagatagacccttcattacttggatacggaccatgttgagggcggtcgacaccatctggacgatatggaaccgatccacaactatcttggcgtttggaaacaaacgtggaactaggttgatatagccggcgttcaggtctaacgacacggtctgcacttgctggcggacactgagtggaaagccttcaaagtacttcgttattgcgtatgccgtccggctcggtagaattgcgccaatctggtgtcgatcgccatcaccccagatgaagctcattttgttggtagctttgaactcatcaaaagccagatgcttcgggagccatagcttttgatggtagttatacttcgccgcttcttcatcaataatccgctggacggtcttatcagccacgtggaagcgtcgcgcaatgtcggttaatgaacagttgctgaaggcttcaaatagcaccatctggcggactggggtgctgatggtgctacgcggtcggacgtaatcagtctcactctgaaagaccgaccggcacaactcacaacgaaatctctgacggctaagcttcatataggtgggacggtagctgtaactgggcataagtacgcaggtacgttcaaacccataacgaactagtttgctggcaaagccacaggcagggcaatgctctggttggagtttaagttcggcatagaagacaagggctttagcgccccgaatttcttcaatgacagcgtcttgcgtaaagataatgttagggtccttgatttctagaaccattcggatagacttacctgtaagggacattacacaaactcctattctctattctttggtcgggacagtgaacgagcagaaagtgtaatgtcctttttgcgcgttcaaatatagaaatggtatagaaaaaggagctggtaggcaagctgcctatcaactccaaatatcgtagcgccattatacttctcccagaagtccaatggtctttttcgatgcctaacgcccaccttcaagcacattgccgatcagcaagccctacaaatacttactgccttcccggatcgccaacggactgagtgcatggacagctatgaatgttcgcacccaatctgggtcaaacttactatactgccgcaaagaccacccgatggccttctgaatgaaaaattcattcgtatccaaatcagccaagatagccttgctaagcagcgccgtatccatcgtttctttttctagcagttgtaaattaattccgatacgccgcagccaaaaactcggttgattaaaaaacaaattaaagactgccagtttctgatcagggtgcagcctcacgtagtccgcaaaaaccttacgccaagcatccactgtatcccaccaacttttctgcacaacgagttgtcgaaaaacctgcatatccgaaaattgccagcgtttgatgtgatcaagtgccaaatcaattgccacatattggtattcccgggcatcgcgttgatacaacgcatcaatccaaactcgaatcgttggtaagtcctcaccgcgactggctttaagcaacggtttcgtctgtgccttgcgttccggtgttttgagtcctaaaaatggaaattgatgcttcatatacttcgccatttgcggcgcttgcgttggatcgccgcttagttcaaaatctaaacactgcatatgttttctccaaccatctacaaaaagtacgatgccctcaccaacgagaacatcgtactttttgaatgctatccacgatgtgcgtccaaaatctctgggccatgtgttgtgccaaccaccacggttttgaccaaatctaagaacaagccgtgctccacaatacctacctgcttattcagccattcagccagcagatgcgggtgctcgattttgcccagatgcaagtcaatgatatagttcttggaatctgtcaacgccttgctcccatcttcatttaagcggtatgccggtttaagtccttcgtcggccaaccgttgcaacagcttgccgctgccaaatgggatcacttcgagcggcagtggaaatttgccaagggtatcgaccaacttggtttcatccacgatccagatgttgcgggccgagttgatagcaacgatcttttcgattaagtgcgaccggccgccacccttgatgccctgaaagtgcttgtcgacttcatcggcaccatcaatcgtcaaatcaatctggccaacctcgtccagtgctttcattgggatgcccagcgattctgcttgtttacgcgtacgaacactggtagcgacaccggttagattgagatgctcgtctttgattcgttgcgcaatcgcttcgaccaaataaaccactgtcgaacctgtccccaaaccaattgtcataccgtcttcaacaaactcagctgctctttgcgcggcttcctgcttcaacttattctggtccatggccaaccatccttttcgcttagttgccttcattataatatgaatcggtcgacagatggcgagttatgtagaaaaagctaaattaatagatccgcaagtttggccacgcggcatcctgcttgttggccgcacgcctttacccaaaaggtacaaaagatcacgttggttgatacaaactcgtataaacaaacgatgccgtcgcgttcttgacgccattgacgaccaatggatactcggccaactgatatctctgggtgttcacaacatcgacttgctggccaatgccggaagtgtttttagccgtaattcgataatggccagcagcaatattggtttcgagtttataaacagcagcggctggtttcagcttgtacactttgccagtacttagacttgtcagcgttaccatcatgccagcggcttggtgaatttgaactgataggtaatttgatgcaccgttcaaactgatttcttcggacatcactggatgtaagctgattcctaagacaacttttaagagagggtataatgaataaatcgtctctcaaaaggaaggaatttttacatgccaactcgttacgacaaagaattcaaacaaaacattatcaacctaatataagcaaggcgaatcagctgcccaactggccagagaatatggcattggctattcaacagttcataagtggatccagggccaggccaaaactcaatccggtaaatcgccagacgaaatcaaagcgatggaaaagcgactggcttcgctgtctgaggagaacgaaatcctaaaaaaagccctgggcttccttgcgcagaagtaaccaatatctttgattacattcaccaagaaagccatcaccaccaggtaaccaagatgtgccgaatcctcggtgtttccagagctcagtattatcgttatcgatcccccaaaccttcaaaacgccgggccgaagatgcggacttgaaacaacggattctgcggatctttgcggaatttaagcagcgatacggtgttatgaagatccaccatgaattgaatctggaacttcaaccactgcagcttcggtgcagtccacgacggatttcccggctcatgaaggaactggatatccactccgttaccgtcaataagtggaaagcggcttcggcttccaaaaccaaggttgaacagcgtcccaacttgcttaagcaggatttctcgaccactggtttaaatcaaaaatggaccgctgatatgacctatattcaaacgaagcgtaatggctggtgttacttatcaaccatcatggacctgcactcacgacggattatcggctattcgttctcaaaaaagatggctactgatttagtcttaaagacccttgaaagcgcggttaaaaatcgaaccattactggggacctgattatccatacggatttaggatcacagtataccagcgataattacaatcaacgtttaactgaactacatatccgccactcatacagccgtaagggttgtccgtatgataatgcgccaatggaatcctttcacgcttccctcaaaaaggaatgtgtttatccagtgccggtctttgaagattatgaaactgccgctgccgtcctttttgaatatgtgcatgctttctacaataggaagagaattcatagttcactgggctaccagacccccttacaagttgaaattgcaacacttacgagccaaatggccgcctgatttaatgctttccagggttcaaataagttattaatcgcgattaatgatttatttgagctgtggaaggtaaacgcggttctgaatgtctcttaaaatctgtctcaaatattgacttcaatccaaaccccaacgccatccaaacgctggccaacacgatgacaatcatggcgccagttgggtcaaccaataagttggcattcgtcatgcccattgctttcaaagcaaagctagcaagactaaccgacgggttaaaaagaaacagccagagaatggaagctgccgcagcactcgttcccatcgtgccggcaaaagctgtttggaaccaactgattcgccgtagcttcatggttgccaaccgtgccaagacaacgccagcaacaatcgtaatggcagcaaaggcaacaacatagactaaggtgcccgcgagactcttcaggaataagggatcttgaaaaatcgagaagtaattccccaaaccaacgaatttcgccgcttccccgcgaatattggtcgcaaagaaactgttgtaaacggtcatgatcatcggatagaacgtgaataaggttaaaatcaataaagacggcattaaaaaccaaaaggccggtttattgttttctttgatcgtcgctgtaagtttacttttggattcagttgcggttttgttgagttctttgttaagctccatattcaaccgcctcccgtgctggcgcagcagcggtgattcgcaccccattgttgctgtcaaaaagatgccattcatcagcatttgccggcaacagtagattcaggtcggcgccaacagcgatagtaaattgctcgggtactcgactgactaatgtctgtccatcaaagtcacagaaaatcatggtgtcattgccaagctgttgcaggcttttcacctttgccgtaattgtatctggattagcgatggacactggcaccaatttttctggccgaataccaaggtggtaagaaccagctggcaaatcaaatggtaggacaaacgcattatcagtccagaaggtgtcgccgatactgaagcgatcgccatcgtcattaatggtaattggcatgagattcatctcaggtgagccaataaacttcgcgacaaactcgttagccggatgattgtaaagatctaggggtgtgccaagttgttgaattttttcatcgtccaatacgagaatccgatcacccatcgtcatggcttccacctgatcatgagtcacgtagatcagtgtcatcccaatctcgcgatgaagtcgcgcaatctcttcacgcatttccgtacgcaactgcgcatccaagttggacagtggttcatccatcaacacgaccggcgccttggttgctaacgcgcgcgccaagctgacccgctgttgctggcggcctgacaactcttttggcttacgatcccgtaagtcgctgagatgcaccagatccaatgcccaatcgactcgcttgcttttttcatcatcattcaggtcctgattttcaagcccgaacctgatattttgcgccacattcataaatggcaacaaagcataattctgaaagaccattgccaacttacgatcttttggcggcaagtccgtgacatcgcgatcattaaaataaatacgtccgtctgttacgctggtcaaaccagcgatcattcgtaaaagcgtacttttgccggaaccagaaggcccgaccatgacgaaaaactcaccgggttcgatctctacggaaacatcggatagcaccttagtattgccaaaatctttggacacgttcgctaatcgaatactcacttcttctcaactccttaccttaatgccaaggttaacggtcatttgtaaaaaaccgcggcaagaggctgtattgtttctgtaagttttctgtaaagctagctatttatgccggaaaacagagatttttttcagaaatagtttaatttttgcgataaaaaagagcacacctgcttcagaaccaccagttatcagcaagaatggtggttttggagcaggtgtgctttttaacgttcgttcattaactatcaagtcacattaatttccatgatgaaccgcaatcaatttctgttgtatctcagccaacttcggcgtgagataaaccgggtaaaaatcaggattaacaagccgctgggtggcttctggcaaggccgctaaagtttcgcgggtatatttttggatcgcgaaaacatcagttggtacatcagcagtgtggccaggtgcgaacaccggttgcaacaatggcttggccgtgaaatcagcaagcgtgacccgtgtctgggttgccaaaggattagcattaacggcggcgattgtttccggtaaaatttcgtctgccaaagcaatgacatcggcaaaagcacgatgactgtcacggtggtataagcgataaacttgtttatggcctggcaatgtcatcttttcgcgactagcgctgactttgatcttcggctgccattgaccatccgtttgcagagccgccattttgtagaccccactcaaaacaggcgacgaggcactagtgatcagcttttcgccaataccgaagttgtcaatcggtgctccctcttttagcaacgattggatcacagtttcatctagggcatttgaagcggtgattttggcatcctgaaaacctgccgcatccagcatcactcgcgcttgtttagctaactgggtgatatcgcccgaatcaattcggatacccacaggctgatgccctgttgcacgcagctccttgaagatcgtgatcgcatttggcaccccggacttcagaacatcataagtatcgaccagcaaggcaccattatctggatacaccttagcccatgcgcgaaaagccgtcagctcgtcactaaacgattcaacccaactgtgtgccattgtgcccgcagccggaatatggaatagctgggctgccaaaacattcgatgtgctggcacagccgccaatgacagctgcccgcgcgccatatactgaagcatctgggccttgtgcccggcgcgcaccaaactccatcacaggacgaccttctgccgccgcggtaatccgccgcgccttcgtggcaatcagtgactgatgattcaccaaatttagcaaaagcgtctccagcaattgcacctgcatcagtggcccttctacagtaagcagcggttcccgtggaaaaaccggcgtgccttctggtaaagcagtcaccctgcaagcaagtttcatcgtcgcaagctcatttagaaaagtctctgagtaaagattcaaggaacgcaagtagtcgatatcagcatcgtcaaaatgaaacgcctgcaaagcttccactacctgttgcaacccagcggcgatgacaaaactaccgtgatccggaaccgtgcgataaaaaatatcaaagacagcctgatctgtatgcggcaaggtcgcacaataaccgtttgccattgaaaactcgtataaatcagttaacatggcatgattcatattcattttaataaaaccttcctttatgacgtctcaacactaatcgataacggttgttcccagcacatgagcaaaatgatcaagtgcccaatcttgcccagctggtgtcaatgcagcgactgccttctgatgaacaactatctggtaattcaggttgtaggcatccactgcagtatgcaacacacaaatatccgtgcacacgccaactaaatgaacagtcgcaattttccgttcgcgcaggcgcaaatctaggggcgtcccggcaaaagcagaatatcgggtcttatcaaacatattgacatgatcttcggcttgatgcgcgtcgtaccaaggcgcaagcgaaccataaaaagcacgtccccacgtaccgcgaacattatgcggcggaaacagtttgctttctggatgatagggatcatgcggcgtgtgaacatccgttggcaaatacacccagccatcttgctgtagaaattcatcagccaaagcaataatttgtggtgctagcacttgaccagccttgccacaggtcaaggccccttcgtcagccacaaaatcattggtgtaatcaatgatcagcagcgcttcatttgtgtgtgccataatttgtatcctttcttaataaaagtattttttacttaaacttgcatcctataaaagtagatccgacttttatttgctctctacgatacgcggtcacatcggatttttcaactctgccagcttgaaaagcttcggtggccggccactacgcgtgcgatcatgagcagtgccgacttcgataaacagctgttgatgggttttcttaaaattagaattatcaatcgcatttgcagtcgtcattaaaaatggtgcatacacttcgcgcgcctctttcaacgtaaacgtcgtccccaaaacttgaagaatcgtaggctgatagtctagtcggttacgaatacggcgaatggccaccgtcaaaatccgggcatgatcaaacgctagctcagatgtcgatgtgcctagcggaaaaatcgttcgcccattttgcagttgataccctgcttcatcagcagcactaaaagcaaaccagcgtgcatcggtagcaccgtaacccggttgcaacttcggcatcgttggcaagtaagtcatgtaagtcaacgccagtgcacgctccccgggggtccgcgtcggatcggtaaatgtcgcaagttgctctgtcgatccacgattaacgtgaattccgatcttatcgcgaatcaatcgaatcgctgctgtgtctgcactttcccgttcacgcaaagtggtttccggcaatgcccagaaaccggcaaacggtgccccggcacgatgaatcaaaagtacctgcaactggtgggttgtccgcgaaaaactccaaataacgttcgtaatcgtgatcaaaggatgcgcaagaaattcgtcagccatgaaatcatactttctttataacaattgtgttcagttgtgattatagcaaaagcgcctaacgatggaattgttaaattctaatccttaggcgtttttatctcaaaaaatattattctgatgaaacaaccgacaactctatagatcgccaaaactcacaaaaaccgatcccgtttttcctgaaaagcttgcacaaaaaggtgcccaacctgttggctgaattgcatagccgtctgccgatcataatcaaattgtgtcagcaccaccgcatacaagcgctcaccttcagcggcaaaacaggccgcatcatgttcgcaatgaggcaactcgccagttttaccggctagccaaccgacgaagttttccatggtcggcgctaacagcagcttggtgcggttttgctgatgccgcagggcttgggcacagatatccgctgccggttcgttgccgtccgacgttaacaaagcgcgcaatagttgccaggcagcgcttgcggtgatcatattatcgccgtcaaaggttgattgcatcaagggtcgccgtagttggatgccaggataatgccgagttagccacgctgcaatggtcggcagcccatacgtggttaatagcgcattggtagccagattatccgataccgtgagcatcaacgtcagcaaatcacgcacgcgccaagcttgtggtgacatgaaacgtaaaatacctgccccgccgaccgattccggaagcgtcacttgccgctcgagttggctgggatcatctgccgctttttcctttacaaaggcggcaatgcccagtttgatcaaactagcagcgggaaatggttgatcaacctgcgcgccaaacagcacatgccgggtatcagcaaccaacaaggcgtgtttgtcgtcaaagttctgattcacttgatcaagccgtgtcacgagtttatcaggcgtcatgcataggatctccaattgtaagctgtggtccgttcgtttgaatgcctgcttgctgctttttgaccatgtagaccgcgtccaaatctgtgaacgtaacattatcatgaaccgcggcaaacgcaatcgccggcaccagactcaggttactttcgatcatacacccaaccatggtcgtcacgccacaagacgcgcaagctgcatcgatcttcgcagcctccgccaaaccgcctgttttcattagtttgatattgatgtgattgactgcgtggcgactgagtaatgccagcgcatcttgaaacccaaagacactctcatccgccatgattggtaactgtcgtatagcagtcaacgttgccaagccttcgtgattgcgcgcagcaactggctgttcaataaaatctatcggtaactgcaaagccgccagttcggtcaccgcaaccttggcttgatcagttgtccatgcttgattggcatcgagacgcaggcgaatatcagggcctgcagctttggcaatcgttttgacgcgctccaaatcatctgccaatcgaccaccaccgactttgatttttaaagccttaaagcctcgggaaacaaatgccttcgcttcgctcaccatatcgggcagcgcttgaatcccaatcgtcatgtcagtcgtgaccgttcgctgttgaccaccgagcaacgctgtcatcgggatgctaacctgctttgcacgcaaatcataaagtgccaattcaaccgctgcaatggcgggttgctccgatgtgctggcatgaagccgcgtcagcaaactattccagtctcgaatgtcacggccaatgagtgccggtatcacctgtgtctgcaagttttcctgcaaggtcgacatcgtatcacctgtcaccaccgcgttgggggtgccggcgccatgaccaactgtgccatttgtcagcaaaacgtcaacttgaacagcatccgctgccgtcacggtatgcatcgctgttgtgaaaggccgcaccagcggtaaactgatcggccgtaactgtattttttgaataattggttctaatccggccatgaagtcgccacctcgaaaaattgggttaataactggcacctaaccgccaaccatgcacgattggcgcggctaggatatattcgattggtcaaacagacaaatccgcgctgggtatcacgatcaaatgctattgatgtccctgtaaacccagtgtgccagtattgatgacgtccttgcgcccaacagcgccagccgagtgtccgaccgcctttacaaaagcggtcaagcagtacaaaggccgctggtggcagaacttgatcgccatttgtcacgggcagaccagccaacaaccgtgtgaaaatagtcagatccgcaagcggggcgaacagccctgcatgaccactaaccccatctagtaaaaaggctttgtggtcgtgaactgtcccacgaatgatgccaccgcgagcaggcacgttttccgttggcacaaaatcggctgcagccacatgttgcggtcgataaccggtcgcatgcatgcccagtggtgcaaaaatatgttgcgtcaggcttgttgccaaatcaccatcgagtgcagcaatcgcccaaccgagtatgatgtagttcaaatccgaataaatcgtctcagtgtctggtgcagcgacagcagccattgttttgatggcatgaatcagccctgcttgatcgagcgcatgggcatcagggacatctgctggcaagccactgcgatgcagcatgagttgttcaatcgtcagttgtgggtagcgcaaaccgctgaccaacgagccaatgggttgggttaattctaacttgccggctataagcaactgcagcagtcgggtggtcgtgccgacaactttcgtcaacgacgccagatcataccgcgcttgcggcaacaacggcagccggtcatccccggcaccttggtagccgatcacatgcaaggcattttcttgcgggccaagcagactatacgacacaccgaaaatcgcgccatcagttatcgcctggttaaccgttggcagcaaagctgtctgcttatttgtgcccatgctcggcctcccaagccgccaaaactgcactgataacaccatcatgatccgccaagacctgcgttgcatcggcggcatccagctcggttttagccatcacaattgcgactgggaccttatgtcccgctgctttcagcaaggttgcagcttggatttgatcaacgccggttgtggccgcaataatgcgttctgcgcgatctaccaacttggcattggttggcaaaacatcgaccattaagttttcaaaaaccttcccggcgcgaatcatgacccctgtcgacaacatattcagaaccatcttttgcgcagtcccagctttcatgcgtgttgatccggtaatcacttccgggccaacaactggggcaatggcgatatccgcatgttgtgccaagacactgtcagggacacaggccaccgaaatcgcaagcgctttggtttgttgcgcaaatgctaaagctccgatcgcatatggcgtccggccagatgcggcaatcccgataaccgtgtcattggcgttcaaattcagtcttttgagatcatgctcggctagctccgcagaatcttccgcgccttcaaccgacttgaacatggccgacatgccgccagcaattagcccgactgcccgctctggcggaataccataagttggtacgagttcagctgcatccaaaactcccaaacggccagaagtgcccgccccggcataaatcaaccggccgccacgattatatcgttgcccggcagcatcgattgccgcggcaatgtggctattttctttggcgattgctggtgcaatttttgcatcttcagcattaatcaacgccaccaaatcaggcgttgtcattgtgtcgatgtgtgtgctggccggatttctttgctcggtcattaagtctgcgattgacatatttttcccctcgaatctttaactcacttgtcaattgtgacgttgcgcgataattctgctcagtttttttgatctcaccttgaacgacccccagaaaaagaatgttcgcgacataagtctccgtgaacattgaggtcaccgcaccgattcgcaacaacggttctgtcggcggcaaggcaatcacgcaacttgccgcttcacgcaacggactcggctcgtgccgtgtcactgcaattaccggcgtttggtttcgccgcgcttgctgagccgccaatacgacctctttagtcaaaccgctgtaggaaaaaacgaccatggcatcggccggtgtcgtataataagcgcgctccactgccgtgtgggtgtcgtggtcaaaaatggccacgtacccagcgcgaatcaatttcaaataaagatcctgagcaactagggcggaagcactgactcccaccagataaatatgacgtgcctgtcgcagcgttgtaatggctgactgcacggcagattgatccaactcatcaggcaaatcacgcactgcggcaatcgcagtctggcttaatttatgcatcatggtcgacaagtcgtcgtcatcctgaaccagcggatcaagtggcatcacctctgcaggtaacgtcttttcccgtgcgagagctagtttaaacgactgcaggtcggcaaactcaaattgacgaacaaaccgaatgacagatgcggccgataccccgcttgcgtgggcaatctgcgctgttgtctgtgcgataaaagtctcaggatcggttataacatgacgagccaaagcttgattcaccggacttaattgcgacagacgcgactgcaacgtctctaagattgtcttcattcggccttatcaataaaagttgcgatggacgttgcactttcgttgggaaccatttgcgcagtgatgatgactccctgtttcaataagcgccgaataatcgcaatatcgtctggtgacacggcaacggaaggcttgattttcttagtgcctggtttttccgacaagttgccaacgttaaaggccttgattggtacgccgccatcaatcaacttcgccatatcgggaatatttcgagtaatgacaaagacttgatcatctgcaaatttgccattctgcaaattctcgatggctttggcaacggagctaattgctagttttttccctgctggtcgggcgattttcaaaccttgaatcgccatctcatcgcgtaccacctcatcgttaaccaccattaagcggttagcgccgactgtgttcgtccagaccatcgctacttggccgtgaatcatccgttcgtcaacacgtgctgccacaattgtcattagaatcttcctttcaaacaacacgggccgatatcatcgcgcccgtgttgttcgcctatcatgattttaaactaaactaccgatccagccgaagatggcgcccagattgcccaacaccatcccgatcagaatcaggacaaaaattagtcgcgttgagttcatatgcttgcgacccagaatccagtatgagaacaaggcaattgctagtggaatcagtgctggcataattttatcaagcatgtcttgcacattcatcgtgaccttgccgactttataggtcaggtcaagcttgtagttgataaccgccggaatcatcgcgccaacaaccgttaacccaaggatagaagcaccttccgtgaaagtcgccatgctatccgcaaaggttgttgccagccgggtcccttgtgacaagccaacttggaacaatttccagcgaacccataaaatgaccaagcaaccaatgaccggaatgagtaacccgattggttgattcgacaaagccagatatgcggtgatcgaatagataatcgcattgtaaattgccacgaaaatcgtatcaccgacgccagcgaacggacccatcaagccagttttcagaccagtgatcgctttttcattctcatcgttcattcccaactgatcctgcaaagcaacatccgcgccgacaattaagtgtgccatttgcggtgtggtgttgaagaagcccatttccatgttcagggcttgtttcattttcttaggatcgtctttatacaaccgtttcaaagctggcatgacagagtaggcatagccaagaccttgcattttttcgtagttccatcccaattgcagacccaacacgttttgaatgaaaatctgcttgagatcttttttagttatcttatttaatttcagttcagacatcgatctcgacctcctcatcggaatcatcgccgccgttgctgccgccattgttatggttgcttgggccgtggttattcgattcgttgcgcttgcggtcgttggcatctaaaacatgtagtgccgcgaagacgaagccaaccagcgctgtgcccagcaaggagaatgttttcgtgaaataagccattaagacaaatccaagaatgaaatatggaaaatagcgtttgagtggcagataccgcatcaggatcgcgatccccatcgctggtaagataatcccggctgttttcaaaccaaccatcaaccatgctgggatccaagcgttgatcgctttaacaaccgcggaaccgaagaacaaaccaacgaaaaccggtagcattcgtgaaactgtccacggaataatcccgtaaaggttattgcgctcaacccctttatagtcgcctttttcagctaagcggtcagcgtgatgttggaaaatcgtgttcgtcatccgcgccaaaatatccatttgtgtcagcagtaagccgattgggatcgccaagccaattccataagccgcgccccgacctgacatgatcgcaaaggcactgcccatgatggatccagaaagaaagtcaggaacggttgcaccgccatacgttgcaacccccaatgtggctaattgcagcgttgcgccgacaatcaagccggttttgagatcacccataactagaccagttaccgccccgccaaacactggcgagaataatccgatcttaacagacaatgcatcaagttgtgcaatgcccacatagatcgtcaagaaaataagtgcaaaagcagatattgacatgatctttcccctccctaataggatgtcatgaatcaagtcaattatgccgccatatgaaactgtatttcaagtatttgagtaagaataattgacattgaaattcagtttcttaaaaaacagcgtcaatacgggtgtaccatttttgacgcaaaagctggcgtcacatgagaaacaccagttattctctgtgctacaacagacgcttcaataagcttgttccttcaaaattattttttgaatttaattcttataatgatgccgattagtccactttgcgcagtttggcgacaagagtccgagacataattctcagtcggcaaaataaaagcgaacaattttccacttaaaggaaatttgttcgcttttgcctgctcatggattatttattgcgattttaaagatcgtagtgccaaggcggagcaatcgtaggtcagatggggctcagccgtgcaaacaacacagcgaccgggcttggcgctgatgttgttaggcgacttcgagaccgcgggctttgcgggctcgaagcgccgtcacagcgttccagccccagctggccgaagattgcggagtttggcacggcaagaaagttttagcctagcatcttccagcgattattcggaatttagtgaatcacaagcccgatgtgagaattatggttcaccctcagtgaagtctgttattgcagttggaactttaacactaccggattatgatcggaatattgaaaacctgtagaaacgacatgcacactttcagctttaatattaggcgaaagaatatagccgtcgattaacgtcacaaaacttttacccggttgatacggttgatccaaggctcgaactgacggcacggcagccttggccaagcccatggtcgggatctgaaaacctgcagggagtttggactttgggaaaagatgggtccacgtttcatcgagatcttttgtgtggaagatttcagcggtattttttaacaagcgatgattgtagtcgccagcaaccatcacatagttacctttctgatacgcttgttcgatatatttaaacaacttggtgaactgtgcctgctgaatcttgacgttcggtgtgaatgccgacatgtgaatgttgaccatgacgaattgtttaccattcgccaccgtggttttggttgccgtaaaagctcggtccagatcaatgattttgttaaaatcagtgtccactggcaaactgtagcgccgggagctatcgaccttggctttacttaacgttagaataccggacttcgctttgccgatcggttgggtgaacgggtagaacaagtaagccgaatcataattctgaccgtatatattggcgtattgttgctgcgccccagtgaccatcttcacttcattcacatgttgtgatcgatcaccatccggatcaatttcctgatagaaagcaacatcaggattttgcgcctgcgtggttttgatcacaccattaatgctggtacgcacggactttttactgtaggctcgcgaatatttgccgccatccatgaaaaaactataacttggcgggtaggaaccatacccgatattgtaagtcatcgccgtataagtctggcccggtttaaactgcgtactttgttgattcttcacttttagcgcctgatcatcaggcacgcgataataagtggtgaataaataaataagaaaacctcagggaaacccgccctgaggtctttttagttagtggccactgccacttacttgtcttcgagtctaaattcatagccaagttcgtttcggtaatacaccggtgacatggcaccaccacaatcttcacacacaaattgaggcagttgatcaggactatacgctaagtcacttccatcaagcatgatcacaatctctcgtggtatttcctcatgcttgtggcatttctgacagataaattcgacgttgtcgttcccaactgaagcggcatcggtcatatgctgctgcttctgcttgcttgtatttggtttgataggcttctttcgcaatgttttgatttacctccaacatgtagtggcgtgcttgtcgatctttcgcatattgtaccttgaggcgcccatttttggccacactcgtccccatgaactcgaaaaactcaccacaatcggaacatttcaagggatcacaaccaaatacttcgactgttttttctgtccatgacttaaccctcataacctgtttcagttcgaccaagcgccgcctaacggctttttgatacactgccataacttgtttcattaaggtcttgatgcgtcgactgtaaatgccgtaacggcgaatcgttttaaaatgtcgatcgggaatatgccgagtcaacaccccaatgaaggcttctactgacattaaatgcgtctctttgcgattggttcgtttatctttgtacgaaaagagcacagattcgccgtcgtacatgacaattcgatccatggcgatgggaccccgcttcatgtaacggctgatgtattttagtaaccctttgaggtgtgtacgacttcgctttggggcattcacgtaaaagccttccgcattggctttgtaggctcgttgtaagcgtggttgaactcttttcttatcccatggcgagagtgtccggcgaattagcttaagcactgcattttgccagtaaactcttaggcgcttatacggaagataatcataggtcttccactgtccatccggggtaatcccgcccatcgtgaccaccatatgcacatgcggattaaattctagttttgatccaaaggtatgcagggcggccaccacaccgccctgtaccttcctattctttcccaacgcttccaaaactactcgcgccgcttcatccatcaaacccttgagtagcaccgatcgatatttgtccatgagaaagatctcgcgtaagccttcatcaatcgtaaagatcacatgtcgatgattaacggcaaacatatcatgtgcaaccaaatcgctccatcgctggctttcgcccacagcacaagtcgggcaaaacttgcctttgcattttaacgcaatgagtttggtgctatgacagccttcacaaacaaataagcgatagcctttccgaatatcaccacaagattcaaatttggcaacttcttttttgaccaccggccgaattcttcgtccatgattcttcaagaatttagcccagttctgatgtttgtcgaaaaagatcgtctaaagaatattctttttcataccaaaattttaccgaagttttgacgggatcaaaagtaattgaacccttgagtaccaaggattcatgaaccccaaaattttataatcccttatacgtctaaaaaagccgtcgaaattcggcggcttttcatcatattacgttaaattattcagcgtcgtaggcagcttggaaaatcttgatgatatcttcctttgtccccttacgagggttagagaaagcattcccatccttcaaggcattttcagccatcaattcaaagtcttctggcttagcaccaatttctttgattgagtgaggaataccaacgtcttcggataattgcttcatggccttgatggctaattcggcagcatcccgcgttgataggccttcagtgttttcacccatgatttcagccaattgggcgaaacgatctgggcaagcaataatgttatattcttcaacgtaaggtagaagtaaggcacagcaaacaccatgaggtgcgtcgtattgaccaccgagttggtgagccatggcatgaacgtaacccaagttggcgttgttgaaggccatcccggctaacatttcagcttcgaccatcttagtccgagcgtccaagttgtggccgttagcaacggcttcacgaagagaagtttcaatcaacttgatagcttccacacattgtgagtcggtgatagggttgtggtcaacggaaacgtaaggttcaacggcttgaacgaaggcatccatcccagtagctgcggttaagcccttaggcacatcgagcatcagagttgggtcgttgaatgaaaccaacggaatgttccgccatgaaacaaccacgaacttcaagtgggtttcttcattcgtgataaccgcgtgacgggttaattcagaaccagtaccggccgtcgtgttaacggcgattaatggtggcaaagccttgtcgagtgtttcaatcccagccaacttggtaatgtcgtcgccattagtcaaaataatgccggcacctttaccagtatcgtgagcagaacccccaccaacagtgatgatggagtccgcaccggattcttcgtaaagtttcttaacttctttgatgttacgaatcttagggttgggttcaacgttgttgtaaacaacgtagtccacaccagcagcctttaaagaatccaaagtctgttccacggcgccgtcctttaaaccttcaaggaacttatccgtgacgataacgggctttttcatccctaacatctttgctcgatcaccaatcttactaatgacaccagggccaaagaaattgacgctgggcatcagaaagtcataactacgttcagccatgatacaaatgccttctttcggaagttttgaaaacaattagtaccaatttcacaaagcaattttaactaataaatttacagtttgcaatcgtttttgggtaaaagggtctgtactagaatttcggacagaaacataagagaattgatttatccgaaaggagtcctcaaaatgacctattcacgcaatcgctacgaccaagattttaagaaaaatgcggtacgtttgagttttaactcttccaaaccagttaaaatcattgcctccgaacttggtgttcctgaaagtgccctgtatcgttggcggaagctatataccgaagatggaaagcaaacgccgtttgcttctttagaagctgagaaccgtgccttaaaacgtgaaaatgccgaattagcattggagcgtgatatgttaaaaaaagccgccgcctactttgccagtctccagaagtaacccccagcgataagtatgcttttatgttgagggaaacctctgtttctgtggtaaagtgggcgcgtttgttagacgtatcaacgagtggttattatggatgtaagctgattcctgagacaacttttaagagagggtataatgaataaatcgtctctcaaaagaaaggaatttttacatgccaactcgttacgacaaagaattcaaacaaaacattatcaacctatataagcaaggcgaatcagctgcccaactggccagagaatatggcattggctattcaacagttcataagtggatccagggccaggccaaaactcaatccggtaaatcgccagacgaaatcaaagcgatggaaaagcgactggcttcgctgtctgaggagaacgaaatcctaaaaaaagccctgggcttccttgcgcagaagtaaccaatatctttgattacattcaccaagaaagccatcaccaccaggtaaccaagatgtgccgaatcctcggtgtttccagagctcagtattatcgttatcgatcccccaaaccttcaaaacgccgggccgaagatgcggacttgtaacaacggattctgcggatctttgcggaatttaagcagcgatacggtgttatgaagatccaccatgaattgaatctgcaacttcaaccactgcagcttcggtgcagtccacgacggatttcccagctcatgaaggaactggatatccactccgttaccgtcaataagtggaaagcggcttcggcttccaaaaccaaggttgaacagcgtcccaacttgcttaagcaggatttctcgaccactggtttaaatcaaaaatggaccgctgatatgacctatattcaaacgaagcgtaatggctggtgttacttatcaaccatcatggacctgcactcacgacggattatcggctattcgttctcaaaaaagatggctactgatttagtcttaaagacccttgaaagcgcggttaaaaatcgaaccattactggggacctgattatccatacggatttaggatcacagtataccagcgatgattacaatcaacgtttaactgaactacatatccgccactcatacagccgtaagggttgtccgtatgataatgcgccaatggaatcctttcacgcttccctcaaaaaggaatgtgtttatccagtgccggtctttgaagattatgaaactgccgctgccgtcctttttgaatatgtgcatgctttctacaataggaagagaattcatagttcactgggctaccagacccccttacaagttgaaattgcaacacttacgagccaaatggccgcctgatttaatgctttccagggttcaaataagttattaatcgcgattaatgatttatttgagctgtggaaggtaaacgcggttctgaatgtctcttaaaatctgtctcaaatattgacttcaatccaagttagtttgtaagcgtcacatagtgcagtacctataattgtcaaaatcctccctctatacttggtctatcaagaagattggaggatttctttatgactcaaaccaatgatctggttccaatccaaatggtcaatcgcgacggtgccgccgtcgtggtgaaacccaaactaggagccaaaattaaactaaacgaagccgaagtccttttctacaatggcatcgataaggtgatggcccggattattttgcaggagttgatggcccatgatacccgacctgtccaaagctaacatttacatcatttgcggtcgcaccgatctgcgaaaaggcattgatggcttggcggccttggtcacggaggagtacaagatggatgtgttcgacaatgcgttattcatcttctgtggtacccgtaaggatcgtttcaaagcactgtattggaccaaaagtggttttctgcttttatacaagcgctttgaaaacggctatatgcaatggccgcgcgatcgcagtgaaattcgccgtttgaattatcgtcaaatgtcacgtctggtcaatggtttagccattgaagaacgccgtaccattcagcctgtaaccccggggtatgtgtactgattgtctgaaagaaagtcttttcttgaagctgacgaaaaggctttcttttcgtgtggccgcttgatatacttttttcaaccattttaacggagggcgcgagatgtcagcggaagcagtcgtgacgacagaacaattcgaatatctcaaacaagagaacgcgctgcttcgcgaacaagtcgagttcttaatgcggcgcctgtacggcactaagcgtgaaagtctcactgacggtcaggttgatctctttgatcaaaccaaaacctttgtggcgccaacagttcctgaaccagaagagcaagatgacaaacctgcaaaacgtaaaaaacaaaaaggcaggaaagcagcgcaactggctccttttcctgaagtggctgtgcaccacgaactaaccggagcggaacgccagtgcccacattgtgccgctgagatgcgtgaaattggggccacggcgaccagccgcgaaccggttcggattccggaacacgttgaagtccacgtccactatcagcacgcctatgaatgtcgccagtgttccaatcagttagatcacagcgtcatcaaaaaggcgatagtgccgaagccgttcattcctaacagctttgcctcaccaagcatcctaacccaaacgatgatcgaaaagtatcgtaaaaaggtcccagcctatcgccagataaaggattggggagacttggggctcgaactaacccgccaacaaatcaccaactggcacattcgggcttgtgactatgggttaggcaatctctacgaactgatgcatcaaacactgctcaaacaaaccgtcgtccacgccgatgaaaccagctatcgcgtgttggaaagcgagaaagtaaacacctatttctgggttttcgcctctggacgcgcggaagacgagcagattattctctatgagcacgccgattcccgcgccacggaagtcccgaagaacttcctcaacgggtatacacattatctccaaaccgatggctatcaagtgtacgacaaacttgatcaggtcacccgagtcgcctgtctttcccacatccgacgtaagttcttcgaggccatgggtaaacagggcaacacgcaaagcggtgccaagaaaggtgtgacatattgtgatcgcatgttcaagatggagcggccatggcggttattaacccctgatcagcgctatcaaaaacgccaaagtcaactgaaatcaactatgtccgatttcttcacttggtgtgaaagtgtccacgccttaccgcaatccaaattcggccgcgccatcgactatgcactcagtcaacgcgaagccatggaaaatgtgttgttggatggccgtttggagctttcaaataaccgcgttgagcgcgccgtcaaggaactcgttatcggtcgcaaaaactggctattctccacgagtttcaaaggggcccggtcaagcgggattatcttgagtgtcatgcgttcggctgaggccaacggtctcgactgccgcaaatacctcgaatacttatttactgaattacccaacctttccgttcctggcgattctaaagcgctgcaggattatttaccatggtcgtcgcaagtccgggcaatctgtgcaagataaacctcaataaaagacaacggcttcggcatttcctcaatcataagggaatccgaagccgttttaaatgtacctcacaatcgtgcgcttacgttgtaagcgtcacatagtgcagtacctataattgtcaaaatcctccctctatacttggtctatcaagaagattggaggatttctttatgactcaaaccaatgatctggttccaatccaaatggtcaatcgcgacggtgccgccgtcgtggtgaaacccaaactaggagccaaaattaaactaaacgaagccgaagtccttttctacaatggcatcgataaggtgatggcccggattattttgcaggagttgatggcccatgatacccgacctgtccaaagctaacatttacatcatttgcggtcgcaccgatctgcgaaaaggcattgatggcttggcggccttggtcacggaggagtacaagatggatgtgttcgacaatgcgttattcatcttctgtggtacccgtaaggatcgtttcaaagcactgtattggaccaaaagtggttttctgcttttatacaagcgctttgaaaacggctatatgcaatggccgcgcgatcgcagtgaaattcgccgtttgaattatcgtcaaatgtcacgtctggtcaatggtttagccattgaagaacgccgtaccattcagcctgtaaccccggggtatgtgtactgattgtctgaaagaaagtcttttcttgaagctgacgaaaaggctttcttttcgtgtggccgcttgatatacttttttcaaccattttaacggagggcgcgagatgtcagcggaagcagtcgtgacgacagaacaattcgaatatctcaaacaagagaacgcgctgcttcgcgaacaagtcgagttcttaatgcggcgcctgtacggcactaagcgtgaaagtctcactgacggtcaggttgatctctttgatcaaaccaaaacctttgtggcgccaacagttcctgaaccagaagagcaagatgacaaacctgcaaaacgtaaaaaacaaaaaggcaggaaagcagcgcaactggctccttttcctgaagtggctgtgcaccacgaactaaccggagcggaacgccagtgcccacattgtgccgctgagatgcgtgaaattggggccacggcgaccagccgcgaaccggttcggattccggaacacgttgaagtccacgtccactatcagcacgcctatgaatgtcgccagtgttccaatcagttagatcacagcgtcatcaaaaaggcgatagtgccgaagccgttcattcctaacagctttgcctcaccaagcatcctaacccaaacgatgatcgaaaagtatcgtaaaaaggtcccagcctatcgccagataaaggattggggagacttggggctcgaactaacccgccaacaaatcaccaactggcacattcgggcttgtgactatgggttaggcaatctctacgaactgatgcatcaaacactgctcaaacaaaccgtcgtccacgccgatgaaaccagctatcgcgtgttggaaagcgagaaagtaaacacctatttctgggttttcgcctctggacgcgcggaagacgagcagattattctctatgagcacgccgattcccgcgccacggaagtcccgaagaacttcctcaacgggtatacacattatctccaaaccgatggctatcaagtgtacgacaaacttgatcaggtcacccgagtcgcctgtctttcccacatccgacgtaagttcttcgaggccatgggtaaacagggcaacacgcaaagcggtgccaagaaaggtgtgacatattgtgatcgcatgttcaagatggagcggccatggcggttattaacccctgatcagcgctatcaaaaacgccaaagtcaactgaaatcaactatgtccgatttcttcacttggtgtgaaagtgtccacgccttaccgcaatccaaattcggccgcgccatcgactatgcactcagtcaacgcgaagccatggaaaatgtgttgttggatggccgtttggagctttcaaataaccgcgttgagcgcgccgtcaaggaactcgttatcggtcgcaaaaactggctattctccacgagtttcaaaggggcccggtcaagcgggattatcttgagtgtcatgcgttcggctgaggccaacggtctcgactgccgcaaatacctcgaatacttatttactgaattacccaacctttccgttcctggcgattctaaagcgctgcaggattatttaccatggtcgtcgcaagtccgggcaatctgtgcaagataaacctcaataaaagacaacggcttcggcatttcctcaatcataagggaatccgaagccgttttaaatgtacctcacaatcgtgcgcttaccttacgttagtttgctgcctccgatagatcaagtcgtgcgagacacaaaaagccatgaacccccgagtcaagctcggcacttcatggcttttttgaaattaaattcgcacctatcccatcatgattttgttcatcagctcagtgatcaaattccagccgttttatccagctgatggccttcttcattgaagacgcgaatcgcatcattggctgctgcattggtcatgagttgttggaaaatatcgtaactgatggtgacattttctgccccagccttgatggcagccatcacttgtgaggccgtcttgaaactggcgcccatgattttaatgtgtgtgtcagtactcttgtagaatgaatgtgtttcggcgatcacgctgtatgggtcaatgtccaactgctccatacgattgacgtaaggggcaatgtaatcacagtcaacgacgcaggccatgaagccctggcgaacggaataaacggccgtgcctagcagacactcatcgggcttttcagcgcgaatagctgatactgcccgatagcctggttcaaataatggaatcttaaaggccatgcgcgtgtcatcattatccggaaagcgcttgcgtaattcatgatagtcagctaacaattcttcctcagtatcgccaaccaattgcacgaacaaaacgcctggcttcaagtcgcgaatcttacctaattgttcgaagcgtggatggccttccttcagcaacaacttgggattggtggtaacaccttcgaactgattgaaacttagcatttctttgacttgatcgaggttcgctgtatcaataaacatggattattccctctaattaaaagcgttcaatggcgatgaaacatgcacataagaaccttggtcgcaatgatcaaagggcggtcatcgcggccaaggccacttatgctccggtttcttaccgcgccggttcacgctcttattattttaattgtagtcccgacatctaattctggatacgtcttttcttccaaataaagcgatcctgcgagctcaggtgttgtcgaaccatcgaaaacaatcgctgtatgaccaaggttgcccagattggtgttcacctcattgccaaccgccgtgatcttataagattgatcgtcgaacgtcatcacatctccgacttcgattggttccaaaattttattgacattaataatgaagcaagacgatcgtaatgcatcaggggcttcatctccaaaaagaatggccatattgatatccttgaacccccgtgcttccgaaccaactttaagaatttttgtctcgtattttactgtttctgctaatgacgacaccttactcacctctacaataaactaacttattttgcgtacaagccaaaacttgctaaccaagcaacaacaacacgtggtaccccgtttagaaaacgggaatacaagacagagacaacgccgacttcaacagtcttggaatcagcttcttcaagtcctaaaccaacaggaatgaagtcagccgcgttttgcgtattaatcgcaaacaatgcaggcaatgcatattgtggctggatgttaccacgaccgatttcaaccccgatcaacgtcccaataacctgagcaataacagccccggggccaaggataggtgacagaaatggtagggagcagatgaagccgatgacgatgagtccaaagacattaccagcaagtggcgtcatgagcttggcgaaccagctacctaagccagagccttgaataataccaatcagtaaggcaacaaaggccatgaatggaataacggtattcagcatcgtctgaacggaatctttagccgcctggttaaaagtagcaatcactttcccagcgccaatcccgatgcgcgcaataaagttgggctttttcatctgcgccgtgatcgttttgttcgtatcgaactttgcttcgcgagcgtcagctgcttcttgatctttagctgtggtggtctgtgtttcaatcgccgtcgcttgagaagctgccgatgctgccaatgcagcgtgctgtttgccagcttcgccacgttggtcaaaaggtaccccatttaatgattgatctggcactgcatcatcaggtaaggctgtaatctgattcacaccaacatttgaaacatacaacttaggcacaatatattttgccagcggaccagacttcccagttggcaatacgttaatcgtcggaatgtttttcttcggataaattccgcaacgtagtgtgccgccacagtcaatgatcgcaactgccgtctcgtcttcagggatagatgtcttgaaaccgtcgactgcttccatcccagttaattcaacaatcttgtcaacgatggcaggtcgattgccgccagtcacgtagataaacttatgcttttgttctgtaggtgtaatggtcaaggggccgccatagccgcctggacctttcacaacttgaatactatgccatttttgatcagccatgatagtaaatgcctcctttattcagacaattaggcttcttgaccattacgcgccgacagatcaactgtcttgctgagcgtaatgccagtttgtttagaaacatatgcggttgtgaagtcggtgacccaaccgccgataaagttcatcacaatcccgactaacatgtagcggattgcgagatccatttgatttaacccaagtttttggacaccttgggcaatgcccaaccagacgaacaattcacctggattaatatgcgggaacacgccattgctggtatggcagaactgtgcttgtgcagcatagtaacttggcttgtagtattccggcaagaagcgggcaagcgtgaagcacattggattacctaacatgaatgctgctaagaatggcaataccagataacgcatcaacacatttcggctcgctttctgggcaaaccgttcgattcgttcttccccaataaaagtaataatcgtgttcatcaataccaacaatagcaagacaactggtacaatgctggtcatccagctaatgaatgtcttgccacctgtttggaacagcttcatgaagccggctgcaaaatcagaaacatattgcatggtctcatctcctaaatttaaattgtattcttcttaaagacattggttagcatctgcggaatcgctttcatttttatgccgatctcattaaagatcggcagtgaaaacatgctgacacgacttgtatcaaagtcttcaaaactgagattattcgttttatagttcacataattgcgatacgcattcagaaaacattcgcgttctgttcgactcagcttctgcagtgctgtgtaatcagcaccaacttcagcgaccagttcaccgtcaaattgattcacgtctcggaatcggctgaaaaccgtgaggcccttcatcacccgaatttcttgaatacgatcatcatggtctaaaccgatcaacatcaaactgccttggcgaaaacgccgaggatttttcccgatcagcacccgaccatcttgccgtacctcgtgataattgtgagcaaaattacgaatctgaaaatagcccattagtgcctgcagtaaaaacgccgctgcaataaagataccaagtatcaaaacgttcatttaaagtccctccgtgacaacggttaagggatcttgactgcctgaaatcttgcgcagattattcatcgccgcttcattcactgctagtaaaaacagcagatcatagagcatcgataaatcctccaaggcttttttccctaaaacacgtggaatcccaataacaaaaatataactaactgctttgccaccaactggaatggcatgtttcagtacacttagatgcaggaacaagcgattctcgtcaatatctgcaatggcatgggggatcgcgacaccgttatcgagcacaaacttggtagtcgattcgtgcttaatcaatcggtcaataaatcccgggtcaaccaaacctgcatcactatctggcttgagtgctgctcgtaagacagcttcatacgacatacttgctcgattctcgaaaacctgtgggcgccagatgattctgccagcatcaatttcgtgttgaaccgctgaaactcgcactttggtttcaagcacgcgatcccggaagatatcaccaatcatgacgaccggaattcgcaatttatgagccaacggccgatctgtgaaaaccatgatcaactcatcttgatgttttagaatatcttcctcatcctgataagcagtgattgtcacctgcgactcgaacatcgtgttaagctgattttgcaaatactgcagcacgctttgccccatgtttgaataaaaaccaactcgtggttgatctggtacattgacatcagcatgctgcaacgccatttcgaagtaaaccgtcagataattgatctcaacatccgcaatatgaatccccattttttcttccaacttgtcaatcatcaagatcgccatatcggcagctagttgaaatcgttgtaacattttgtccgtcaaataatcagacggagaaatgtggaaaataccgcgattaatcaagaaaatcaaatgatacttagtcgtctcataaaattggtcatagtcaatcttggcatcaaccaaagctcgaacttcactggcaatttggtcgaacattgctttgttttcgtgaacctttaccttcaacttagctggtgacaataacttattcgcatacaagttgaagggaaaggcaaggaaatcatattcttcttggctaaatgacacatggcagcgatcttcaatatcaccaacaatgttaatgaaaagtggtgaatcgtccatcaagttcgtataatacggactaataccactgaatacataatgatgctttttcaggaagacgatgatttgcatgaccttctcaaaaatttgtgttgtgctcgtctttatcttggctgagttcagccgactgacgactgatgcaaccaaagttttatccgtaaaaattcgcgactgcacataatcaaagaggtgattgtaaatcaacatggttaagtcaacagttgaccccacttgtaacttaaccccgcgacttgtcgccccttcaatttggagatcataatttttcaaccaagcgcgacaagcttctaaatcttttaataaagtgccgcgactgaccgtcaattgatcagcgatttcatccataggaatgaattgccgttctttgataagacgaaaaagaatttccgcctgccgcttctgcttgtcgttattatcaatattttgtttgaagacacctgattgaattaaagaaaattggcgataatccaagatgtgcaagaagtaaccatttttattaatgcgaatttctgcagcatccccaagtgattctcctagctcatgaatgtacttctgcatcgtacgcgttgagacgttttcgctttcggccaactcgtctaaatcagatgtgccatttgctaggagatagcgtagaagtcgataatccaaactattcaatcaggttaccccccaagcttatgaattaacctctggacttaccccctgcaacattggttgtcacacctgtaatataactagcacgattggacaagaagtagttgaccaaatcacccacttcactcaatttgccactacgacctaatggtgtagtagacgttgaactgtagccggcacggattgcatcaacggtggtatcacgcgtataagccaaagcttcttcataactcggtgtccgtaagcctgttgcttccatgatgccaggtgcgacccccacaacccggatattgtacttgcctaactctttagcccaagaacgggtgaacccgttgatggcacctttacttgctgaataaacactctgaccaacagaaccttcaaggccagcctcagaagacatattgacgacaaccccatgtccctgtttgaccatccgacgaacgactgcttgtgaaaccaagaagacacttttaacgttaacactgaagatttgttcaaatgtcttaacgtccaattcatatttaccatgtggatctttaggatcaaccaatacccgcggcttgttgatacctgcattattcacgacgccccagatttctccattgatcttctcggcggtggcggcaagattttcaacttcgtcaggatcagtcacatcagtatgcacatacttcaagttaggttccttaaagtcgccttccttgagatcgccgttaacaaccgtagcgccattattaatcaattccttgacgatcgcagcgccaattcctgatgaacctccagttacaacaactgtcttgccatctaaacctaaccaatcagacatattcaatctctccctttcatctttctgctctatggtagcgcttacgagagaaagatttaagacagtcattttccgacgtcggggaaaaaacgtgcacgatggttaacgaaaacaactggatatcgttaaatacctagattgcataattaaagttaccacccagaaaatgtgaaaaaagacctgtcccttcttgctaaaatggtgtttgcataacatacaatctagagagaaggacagggcccatggccattataaccttaattgaacgatctcagatagaactaatgcaacaccacacgattcaatacatcgccgcgactttaagccgctctcgtatttctattaggcatgagcttcaccgttgccctgaaggcgattactgcgccattatagctcaggatcatgccgatacttgtcggcatcgttgtggtcggcactcgattttaacgcctaagttgaagcggatggtaactgagaggctaaccctaggttggtcccctgaaatggtcggttatgccgttcactgtgcaccacacacgatttaccactggatttatcaaagacaagtcgattttcagccaagtcaactctttgatcacggaaaatgtcataaaagaagacaagaccttcggtcgcgctataaccaagcagtaggcacctcaattgagattcgcagtgagtcagctaatcggcgaaccgaaaaaggacatttagagatggatacaattcgcggtggtcgcgggtcaaaggctgctgttttgaccattgtcgatcgggtcacacgtttaatggcgacaactaagcttgaaaacttatcacaaaatgctgttctcaagggttttgcaagactgatggtggactttccgggtccggttcgatcagtgacggttgatcacggtaaagagttttcctgcgatcaggcgcttacaaagcgctatcggataccggtttacttttgccacgcctatcacccgaatgaacggggcacaaatgaacggttcaatcgagaacttcgctactatttcccgaagggaacacagtttgatcaggtttcagaggccaatattcaacgagccacagcgcttatcaataacaaacccagaaaatgtctccgttggcaaaccccagttcaagcagtgagcaagcctctttctaggtggtaactttattattgcaatctaggaatagtcaactatcacttgaaggtgaaactagtgaaggatcatgtaaaaagagccggttagcggtgcttgaccacttaaccagctcttatttttgaaaacagggatctcgcttgcttttaatatcacgccttagccgcatgccccaccgacttagcattatcctgcccataataagcatccttaccatgttttcgataataatgcttgtccaacaaatactgtggcaagtgcacgtcttgatgtgtcagcgttaatgcgtgataatccatttctgcgacaacttccaagactttggcgttataaaccgccttagctggggtcgctccccagctgaatggaccatgttggctgaccagaactgcaggaactgcgttgtgatcaataccgcgatctttgaaggttttgacgatgactttccctgtgttttcctcgtaagcatcttcaatttcttgttgcgtcaacgcttcggagatgggcacatccccataaaacgtgtcagcggcggttgtattcaggttggggatatccatgtgtgccgaagcgaacgcaactgcccatggtgaatgggtatggacaatcccaccgatgtcgggaactcattatagaggacggtgtgtgtcggcgtgtcgcttgaagggttcagttgcccttctacaacttcgccttgcaggttgacgacaaccatgtcatccggcgttaagtcttcgtaatcaacgccagatggtttaatgacgaacaatcccttttcccgatcaatgccggaaacattgccccaagtaaaagtaaccagatctaattttggcaactgcatatttgcttcgtagacttcttgttttaattgttcaagcatgaaagttcactcctgttcatttattgaatatcgttatttgtcaatcactgactgactgcgttgttttcccgataaatggtctatatcaataaacccaaatttaaaacttaatgtacacaatgacctgaaagcgcttttaacgccgtcaactctgatataatgggttgtaaccacgtgaagttagaaaggaagtttacccatgcttaaagctattgcccttgatatggataacacgttacttaatagtcaaaaagaaattagtgtcacgaatcaagatgtgctccgctatcttagccgcaaaggtatacgtgtcattctctgttctggtcggccatttgccactttgaagccatttttggatcagcttcatttaactaaaaatgatgatgtctgcatttgtttcaacggcggcttagtccgattagtacgggatcacaccgtcatcaaatcttcaacgctgactaaatcacaaatccagccagtttatgatctcgttaaggaaaaaggtttccacttagatgtggttgctgaagatcaggtgtattcgttaactgaatttggtaaatccagctatgagtccatgattcctaaacaaatgccatttaccgatacgacatttgctaaggtgccagccaaattatcgatttttaaagtggtcatcgctggcgatccagaaatggttgatgcggcttcagaagctgcgcaatcaatagagggcgtcaccgtgacaagatcacgacgtaccttactggaaatcatgccgcctaatgtgaataagaagaacggtttgaaagcaaccctcaacttttatcgcattccgcgcgagcaattagctgcatttggcgatgaagaaaacgatcaagatatgcttgactacgctggtattggcatcgccatgggtaacgcgattcctgaaatcaagaaaatcgctgatattacgacgcaatccaatgatgaagatggcgtcgcgaaattcttgattgattacttccagatcagtccaactgcgatccatccataactcgtctaaagccacgcttcctccaggtggcttttttcgtggtcagggtcagcgttttttcaccagtttgcgcgttgtgatcaacagttttacgcgactgctacaccactggttcctgctccaatccaacgcgttcaaaaagatcatcaaagaactgtttcgcttttttcacttcagctagcggattatcagctttttccgtccacatctcgatggtgaacgcgccgccataattaaggcgtctcaacgtacgcagacagccttcgaaatcaacggtgccatcgccaaacggtacatctcggaactgacctttactttcggcggtgactggcaaggtatcttttaaatgaaccgaaacaatattatcaatgcctcgttctaactcttgaccgacattattttccggccaagcagtcagattgccgacgtctgggtatgcctgcaaccacggactgcgaatttgcgttttgatgtcctaaattttggtcaaggcgtttaggaaaggatcatccattgtttcgatatcaagcatgacttctttagccgcggcataagcgacgccgcgttttaagttctcaatgaagtattcccgtgacgtcacggttttcggttcgtaataaacatcatagccagccagctgaatattgcgaatgccgagatcaccggctaaatcaatcgccttataaagcatttcaaggcttttttctcgaattgccagatcagccgtgccaagtgggtaacgacgatggccactgagcattaaggtgtgcagtctcacaccggtttgccaacttgcatcccgtacttctgctcgctgtgctttcgtccaatcaagtcgggctaagcgttcatcgctttcatcaatcgacaattccaaaaagttgaaccctaaatcgtgagcctgttgcaacctctgctgccatgaatcagtttttgggagtgccttttcgtagattcctagtgaattcaatgttgtgcctccttaaacgcgtttgctgccccagaaacctgcacacacgttttgtattcgctttcataaatacataattgctattcaaaagacggtggccttagcaagcccgcgctccaacccttttttcaggctggacaccggctaagctaatggtcaccgccagcttgcttactgtcctatatcacgtttaattcgatacctgaatcacatcaatgccttgccggcgcaagtcgcggacgaccttttcattcgcaaagttatctgtgatcaaaatatcaacgccggttaaatctgcaacatggtaattgcttgtgacgccaacttttcgataatcggccacgcaaatcactttttgcttggttctggagatcatcgtgctgttgatctgcgcttcgtaaatattttgggttgtcacgccacctgcgacgctaatgccgtcacagccaatcaacgtataatctgactgcatcgtttccagaatctgcatcgcaactgtgccgaccaacgactcttttggatagcgaatttcgccgccggtcagaatgatggaggtttctggatgacgcacgcactcagttgccttgatattgtttgtgataatcgtcagcggcatgatcgctaactgattaattgcccgccaacacaagggtctgtactagaatttcggacagaaacataagagaattgatttatccgaaaggagtcctcaaaatgacctattcacgcaatcgctacgaccaagattttaagaaaaatgcggtacgtttgagttttaactcttccaaaccagttaaaatcattgcctccgaacttggtgttcctgaaagtgccctgtatcgttggcggaagctatataccgaagatggaaagcaaacgccgtttgcttctttagaagctgagaaccgtgccttaaaacgtgaaaatgccgaattagcattggagcgtgatatgttaaaaaaagccgccgcctactttgccagtctccagaagtaacccccagcgataagtatgcttttatgttgagggaaacctctgtttctgtggtaaggtgggcgcgtttgttagacgtatcaacgagtggttattatgcttggcggagagctttgccaaagcgaaacgccaaagaaaggcaatatcgtcaacgaatcaaacactttttttatcaaggacagggcacttacgggcccaaacgcatctgcggtttattgcgtaaaaatggtaataaagcttccttcatcaaatatccaatcatatggacacggatttagtcttagcgacacttaaacaagcccaccaaaggtgggctttgccagaaacgtgtatttttcatagtgaccgtggtagccaatacacggccaaagcagtgacaaagttggtcaaccaatatcattggcaacgtagcttctcagcattgggaaaaccgggtgataacgcttggagcgaaagcttctttgccatcatgaagaaagagctcatttatcagatacaatttaaagatatcaatgatctgagagcgcaagtcttcgcttacatcgagaccttttacaaccgcgtaagggtacaagcacgcttagactatcttgcaccagtagcatggctttccttgtatgaccaagcttcacaaaaagtcgcttagcaaactgtccgaaaaagtgttgacttcccgggtctttcatcaatcgaggtaccaagcttcgtcttattggtgcgggtatgggaatggcttcgtttaattcgcaagctgggtttgcgcggtaagtcgtgggtccgtagttcgaatctaccggcctcaatatcccggtaaaccgttggtgttgaaggaacaacctcgtctgcgtgttcccgtttgaaggtgtgcacgaagctgtccacactgtgtacgcgtggacgttgcttgatggcagcggcacaggcggcgtagaactcggggttcttctcaagcatcgtcttggggcgacaccgctcccgccgctgagcgtgcagataagctgccgtatcagcaaagtaaatcaacgctaccttatgcccgggaattcgctgtagaacggagccacgagtgatctcacgcgaaatagtactacgagagcggttgagttcgcgggcaatccgtgcttgggagaatccctgattgagcagagtttcaatgcgaacgcgatcaaaatttgatagttgttggtaagccttagagatggtacgcttgatgttggtcatgatgtgcctttcttatgtgcttggtcgcttataagaataggtcatcatggcctttttggtctatttaattatgtgttgcacttagattgtaaacgcggggaatgtaacgagcttgtataacgcgttcaaagattatttaaaccagcaaaccgaccttaaagtcagtgaagtgcctttagaacctgtctagtatcttttaagaactatcttcaggaaggccaatacaaccatttgaagactgctgttaagggcacgttcacagtttttccaaagtcgccgacatttgtctagccaactccatgaacgttcaacgatccatcgttgcggtaacaccgtgaacatatgcaactcattgcgtttagctaccgtcgtcttagcattcaaaatgagcttcacctgatccgcaaagtcattgccagtgtagccaccatcaaccatgacatgctgaaccagctctaaattttggctagccaaactaaacatagccaatgcacctgaacgatctgatacattagctcgtgtcacgagaatggcttgtggtaaaccattaatatcaaccgccatatgacgcttaatccctgaaatctttttgccgccatcgtagccactatttttcgttaaatcagtggttttaacactttgagcatcaacaatcacaaacgacgttcgggccgatcggccctgtgcaaagcgataggaagcaacagtttttttaaaagcctttctaatagcgaatcagctgtcgggtctggtttatctcgccacatatcgtaatagcggtagacagtgtgccattccgggaaatcttgcggtaattcacgccattgacaccctgtagtaagcgagtaaaggatggcattgaatacgtcataaagatcataacgacgcggtcttgtatgcttgcggaagttttctaaatcaggttgtattaacgcaaattgcgctcgagaaatattgcttggataatctggcatgacaaactcctcagtcggttttccacaattctaccagattcagcagatactagacaggttcttagagacgctaaatggggctaaggggtattttcaacccagcactaatgaaatcgtcattggtggcgatgagcccgataatgctttaaaattgaagacgttatatcatgaataagcgcatagccagctacacggattaaaatcagcctttaaagatcggccacgagcctatcaggaaacccaagccgaagcgatcgcgtatgttgccatgcaaaatattggcgttgataccagcaactactcactcggttacgtggccacctgggccaaagataaagccgtgatccatagtgctttaagtgagatccagcaagtgagcaacaaagtgattgagcttagcgatggcttaaccaaacaattaggcttacaagaagcccaaaaagagcctgagcataatctaaaaaagctatcagcccatgatcttaataagtcctatcaaggcttgcaacaacaagttcagcaagcaactaatccacaacaaaaatcagaactacaaaataaattaaatgatgtacaccatgaaatcagtaatcgaacgcaaaaacaactgaaagcattttctgaacaaaacccggcaattaaacaaccagaacataatgtagctaaaacattgaaaagatagggggatttaacactatgaaaattgttcttttagatggatatgaactaaacaaagatttaaattggaaaagcttgcaagaattaggcgactgcactttatatgatcgtaccccagttaacgataacgctgaaatcataaaacgaattaaatatgctgatatcgtcattacacacaaaacaccgctagatcatgaagtgattagcaaaacatcacgattgaagtatatcggaatcatgggaaccggttatgatgtcgttgatattgagagcgcacaccagaacaaggttgtggtgactaacattcccacatatgcaagtgacgcagtggcacaatttactttctcgttattattagaagtgactagccaagttggattgcataatcagcttgttcatgaaaaccggtgggcacaggctcctgattttactttttgggaaaaaccgctattagaattaaaaggaaaaactttaggactaatcggttatggccatattgcgcaaaaagttgctaaaataggacacgctttttctatgaaagttattttctataatcatcgtcctaaaaaggttcctgaatcatggattcagcaggtttcatttgatgaactattaaggcaatctgatgtgcttagtctgcatgtgatccaaacaccagaaacaattgatttaattaataatgatacgattgccaaaatgaaaactggggttattatattgaatacagcacggggaaaattggttaatgaatcagaccttgcatgtgctttaaacaaaggaaaagtttatgcgtttgcaactgatgttgtacaaaaagaaccaattgatagtaataacccattactaaaagctaaaaattgttatattacgcctcacattgcttgggcacctttagaaacccgagaaaggttgctagatataacagttgataatttaaaagcgtacctatcaaaaaaaccacaaaacatcgttaaatagaattactaaataagagatgttttgaaaacgttttattggtagtaatatattcctagattgcaataataaagttaccacctagaaagaggcttgctcactgcttgaactggggtttgccaacggagacattttctgggtttgttattgataagcgctgtggctcgttgaatattggcctctgaaacctgatcaaactgtgttcccttcgggaaatagtagcgaagttctcgattgaaccgttcatttgtgccccgttcattcgggtgataggcgtggcaaaagtaaaccggtatccgatagcgctttgtaagcgcctgatcgcaggaaaactctttaccgtgatcaaccgtcactgatcgaaccggacccggaaagtccaccatcagtcttgcaaaacccttgagaacagcattttgtgataagttttcaagcttagttgtcgccattaaacgtgtgacccgatcgacaatggtcaaaacagcagcctttgacccgcgaccaccgcgaactgtatccatctctaaatgtcctttttcggttcgccgattagctgactcactgcgaatctcaattgaggtgcctactgcttggttatagcgcgaccgaaggtcttgtcttcttttatgacgtttaccgtgatcaaagagttgccttggctgaaaatcgacttgtctttgataaatccagtggtaaatcgtgtgtggcgcacagtgaacggcataaccgaccatttcaggggaccaacctagggttagcctctcagttaccatccgcttcaacttaggcgttaaaatcgagtgccgaccacaacgatgccgacaagtatcgacatgatcctgagctataatggcgcagtaatcaccttcacggcaacggtgaagctcatgcctaatagaaatacgagagcggcctaaggtcgcagcgatgtattgaatcgtgtggtgttgcatcagttctatctgagatcgttcaattaaggttataatggccatgggacctgtccttctctctagatggtatgttatgcaaacaccattttagcaagaacggacaggtcttttttcacattttctgggtggtaactttaattatgcaatctaggtctgcataacatttgacaaaacaaaccattctaattagaatggttttacaaagatgaaaagaggatattaacatgataataactggtgcaacaggtaaaattggtgctaaagtatcaaaaatacttgactctgaaaacttaacttttacagcactatctagaagtaaagaaaaattaattgctttaaacttgccacacatgaaaattattgagggaacgattgaagattctgaaaattggatgagacaactgaagaatgttgaccaagagttgctattcttagttcgtgttaatgactcattggaagttttgaagtctgcgaaaaagcacggaattaaaaaaattgtatttctgtcatcggcctctatcaaccataataatagtgtagactcacaaaatgcaattgaccataaaataatagaagataacataaaagaaatgggttttgagtatgtatttattagaccagaagcctttatgggaaatgcactgtactggagtaatttatttaaatattctaagaatgaaatcaagtggccacagcttaaagcgaagtatgctagtgttcatgaaagtgatgtcgcagaagttattgttgaagtgatgaaatcattttcgacatttgagggacaaattttaaccttaactggcgccaacgtaattacccaaaaatatatgttggaagaaattatcagacaaacagcatccaatatacaactacatgagcagtcactttctgagtttgaaacttatatgagtaagtatatggaacaaaagtacgtttcacttcgcgaggaagactggcaatatagcttgcataataaattagaactaaccaacacaataagtaatatattagacagagaacccttaacatatcgagaatgggtttcggaaaatttgactacttttcaaggtgtgtaatgattccattattaatactggggattttgctagaaataggtgaaagcagtccttatattgttttaagcacgataaaaaaaagaaattataaatacttagtccatgtgactaccggatcgctgtactataattttaaacaacttgaaaaaagcaaatatttgaaactcaccaggatagaaaaatcagattcttatcccgatcaatccttttatcaagttactgatcaaggaaatcagcactttaccgaattaatggataaatattctaatagtcacgaagatataaaattttcattctatttgcctacgttatttattgataaattcacgcagagtgattttgaaaagtctctgaaaaatcaaattaatttttcagagatgaagataaaagaaattaatgattccttatcgagaaacagtgataacattccactttcatctaaaataatgatgcagaatgctagagaacattataaaataaatatagaaatgtttacagacctactatctaaaaagtaaaaaactgagataggtagtccacgacaaaaaaatgctatgcaatcgaataaataccatagcatttttatgttattcaaaattgactatattttgttcattaatttacgctgtgaactatgctacccgacagatatgtctgtaaattagatattgtaatgtataacagtctttcgcgtgtttcaaacggcgcccaggcaatgtgaggggttatatagcagtttttagctttaagtaagaacccgtctagtatcttttaagaactatcttcaggaaggccaatacaaccaggtagcgtcaagaatcttgtgtaaatgaaatgccttcgtacatataatatgtatctaacttaaataaatgatgcttccaaggtgtcctggagtccttttaaccctcggtggatccgcttcagagacttctcgttataaacattaaactgagaaaccaggaaacgatccagtgaatcttccgttggaaattgttctttgtggtgggtggtgcgcttgagatgcttattaaagttctcaatcaggttagtggagtatagtgattgccggatagctggtggaaagtccaggaaagtgagtaaattcggcattttaagcagatctttgattaatttgggataggtctgatgccagttgttggcgaactcattcagtttcagttcggctgcttcacggttggcggcccgatgaacttgtttaaagtcactgatcacggccttgcggtcttttacgcgaactttgttcatcagattccgcccaacatgaaccaggcaacgttgtcgtttggctttagggaaatgccgattcaagccttcatccaaaccaactaacccatcggccacaaacaacagcacatctttaacgccctgcttgatcaaggttcccagcagttcagtccagattccagtcgattccgttggcgccacttggtagttcagcacttctttcgtaccatctggacgaatgccaattgcaatatgaacggcttctttttgaacggtatcccgctttaacggcaagtaagtggcatctaagaagatggccgcatattgtgaagccagtcgacgttgctggaaagcttgaacctgttcattgacggctttagtcatgttggaaaccgtggctttggagtagtgagcaccgtacattttctcaatgagttcggcaatttcagcagtggtaattcccttggtatacaactgaatgaccgttgtttctaaattatcactgtgccgaccgtaggctggcaaggtatgattttcaaaccggccattgcgatctcgaggaatggttaagttaagttggccgtacttcgtatcaaacgagcgctcataactgccgttgcggttattaccagtgttaatcccaacgtatgagtagcgttcgtaacccaaaaactctgccaattcggtttgaagcagctggttaatcgcaatttcgaggtggtgacgaaaaacttcgtccaaatcttgcttttgggctagtgcagcgataatttctgtggtaagttcattcatggggaatgcctcctgtgatgttttctgtggttactaaatatcataagggaaggcattccctatttctatacaattcagaaatcttttatgcatttacacaagatattttacgctctcaacgatcctgttttggcttcaagaatcagctgaacttcttcaaacgaatctaccaaatcacggcataacatgacaaagacggctccccaaatggagaaccgcctcaaatgataaatttattcttcaacaccagttgatgtagagcctcttttgtttcctgtttgactatcatattttaggtcccagctaagggctaaactgccacggttatctcgaatgtttatttcagctttaaaatcatttgttgcaaagccaatgtccttaacatggcgctacctaaaaatcaattacaatggagaaatctagatttcaggaacggcttgcaccgtcactgaaatattacctcttgtagctcgagaataagggcagacctggtgtgcttcgtctaacaattcttgcacttttgaaagggggagattagcaatgaagccttcaatttctactcctaaaacaacatctgggactgattccttactttgattatacaacgatactctaaccttgatgatcgaattaccgcgaatattcttagctcgtttgatataatctaaagcgctattaaagcaagcactatagcccgcagcgaaaagttcttctggattggttccttccgttttactgcccggttcttcaatgtttacgttgaaagagtggtttgggctatgtgactcaccagaacgtcctccagtgttaatcatggttgttgtatatactttcttcatttgatgacttccttgaaataatcgcagctttcgttaaacgcaagccactcgactaacgactcatacttgaagccatcttaatggcagtttcggctgaacgtgcagatattttatacaagatagcaccttcttgccaagtaatagtttggtttaatccattatcagtgacatcaaagttgcctgccccaacttggctcggaatgggaagcgagtactggttaaacaatgctaccagttgtttgctcatagcaactggatcttggcccatgacaggtgaggcatgtactgttaccgaccagcgacctgcttgccatgtgagataagcttgtccagctcctcgatcaatagtcccctgaacaccactcccaagatcaatgaccggtaacccagtctcttgtgtgtggtgattaaccgcggtcactgcagccgctgtggagacataggcggttttattgaatgttgcataaggcgtttcgctagctaaggtgctggcattaaattccttggctgtagctccaacactataataaaccgtatatccgtatgcattactgatatagtgcatattcaagcgattgtgattttcgttcaacccatcaacagttggtttttttgtagtcccaattgccatagacaacttctgattgagctcttgaattcgagaatctgtagtatcttcttttactgatgaggtctttgatgatattgaactagccacagtagatgaagaactagaagacattttctcttttgcagaattagataccttcgtagtggaactaatggatgttgatgatgttttagagttgttactgagcttcgaacagcctccgagtaacaggcttgctgtcaacgttgcaataacaatcttggccctcatgtgacattccttctttcaattattgtgtcacggcgtctctagattgaattaactgcctacacggtccgaaattatcacttatgatcattataacatgaaacgggtttgattgtgcaaaacctgttttttaaaaattcaaccattaacgccatttcatttgaatacttgatatatatccttataaaggccttacagattagtcaaaaaatgttataaattttcctatcactagagactaagttctttaaaaagtcgttgccactgattagtaacatccgaaagtgagaaatcatgacttcgttgtaaggcttgattagcccaatagtcccgaatggatggtgaatacatgagggtatcaagctttatgtttaggtcatgcacacgatgatcctgtgtcagaactccaaatttcccccatttaaaaattcttgggcgcctgtattattcattgatataacaggtaatccgaaactcattgcttcaccaatcactagtggtagtccctcccaacgagacgtcatcataaaaatcgaggatgtttgataatgtattgccaactgttcatccgttagcgatcctgtcagtttcaacttattattcacgttcatttgactgatcaaatttctcaatttgttttcgtctggacctgaaccagctaagcgaatctcccaatcatccggtatgttcgcggcaatcttaaccaacaagtccaaacctttttgttgaatatcgattctagaaaccatactaatgacgtggtttgttaatgaagagatagtgcctcttttgatggtcagtggattgtaaatcttgatagttcgtgactgtatttttgaaaaacgaatgacatcatggcgcgtcaaaacaaccacacgatcagcactacgcaatccggttataaattcagattgcatattgcgatgatagttatccatataggtttcgtagttgttatgcagctaggcaataatccgcacctgtggcactcgcgctttaatctgcgacgaaaagctggttaataatccggctgtcaaaattacaacatcatagtcacccttaataaggacctgaatcagatcattaatttgtgacgaatattttgttaatggtttgctgccgcgaaagcttctgccagtgttaacaggatttgaagtcgttataagcggtgcattcaactcaaagaaggttggcgtagtggccaaggtaaaatacgctactttatttgttttagcgagttcattacctacaacagtagcgactcttttaacgccatccattaacaagttctcaacacagatcaaaatcttcattagtaaccacactcctttggaaatagaacagtctattcagccaagccgtttctgacactgaagaggctacgatacaggactgcaagagatgatgaaagcgattcattaatctttctaaatgagtttcttcctattatatatgcacgctgaccagaaatgaaactaatcagtttctacagcgataagatccttagagcattcagaggctctggtgcaaataatctgaaagatagcccccaattttaaagtcaagtgcaacgatgataacgaatccttgatagtggtctagtctgttacgccatgcatcggtagtaatcgcatgggcgaagatagttcagaatacgtcttggacgatggttcagtgcggattggactgcttgaatttcaaccagggtaactgctctgagagacttccctttcgggaagaattccctaagcagtccattggcgttctcgtttgtgccacgctcccaaggcgagtacggatgtgcgaagtaaatctgggttccaacaatctctgataacttggcaaactcggaaccattgtcaaaagtgatactctcaaattccttggccccgtagtcgtcgatcgtgtcctgcaaggctttaaggcaggtgcccgcatgatagtcaggaatcttgacgatgatctcagtccggctgtaccgttctgtgagcgtcattaatgctggctcatcagctaagcgaatacctttgaccaagtcgccttcccaatgtcccacgcctgtgcggtcattcacggccgcaggacgcaactcgattgagtcgccgtatatcttcttattcttgcgcttgtgggcgttcttatagcctttgatgcggcgtcggagcttcttgggaagtgtcatgttgtctagctcaagcagcccggcgtcgatgtagcgatacacagttgtcgttgaagggcaagccttgccctggtcgcgatagaagtgtacgaagctatcaacgctgtgtacgcgcggcttacgagtaagctccctggcgagagccttgaagaacgcacggccggtcttaagaaaggcgtagtgaccggttctatcgcgtttacggtcgtgcatggcttgggcagtttccgcaagatagacttgatgcgagtgacgcttcgagtcgagctgagttacagatccacgcgtgatttctcgtgagattgtcgctttactgcgatgaagcttctgtgcaatcacggtcgcggtgtcaccagcagcccgaagggcctgaattgtagcacggtcgctaaaactgagttgttggtaatgcttgtgggtgttagtctgagagtgggtcatgaagattcctgctttcttgtttagctagcactaacaagaataggtcttcatggcctttttggtctagtcgtcagggtgttgcacttgaattgtaaactggggatctgaaagatagccaactaaccagcagttaatactgtgctgaaggttgtgcagatatcaatgtttctcattcgtctacgactgaaaacccgatgagacttaacgctcttcgggttcttttgtgtattgcgtgaacgatcttcacaccactcagcgttgcactagcggttcgaagactatgaaagcttgcagatcggacacgatgtcgtttcatgaatcgatgatcctgctcaatcagattgtttcgatatttgaagcactgatgagctgaactactaaaatgattttgttttaccagctgcttggctgcagtataatcgcggtatttttttagctcaaaatccaagataaaaccgttactgtcaatagcgcgatacaaataggtcaaacggccttcaactcgaatataggtctcgtcaatttgccaacttttagagtgaactgtttgatcgacgccatagcgccttaaagatagaccatagtgatgaacccaacgcatgaccgtggtgtgatgaacggtcataccccggtcccgaagcaactcaacgaagtcacgatagctgagactgcatccacaagagtagccaacggctactaagatgatattcactttgaaagcggcgtctcttaaagtgatgcatgcgtgcaatccctcgtttcttggcaccaagtatactagaatgaaatcagagaagaaagttcacgtcagaacctatattccatttataagtgagcggctaaataatcaaataggaaaggctttgccttgcaagatacacaagggtgtaccctattgtaactaaagtgagaagggagtattattagttacatataagtgacccggaggcgacctagaattgtctaaaatcggttatgcgcgtgttagtacgcgtgatcaaaatctggcgcgtcaaattgaacagctacatgatgccggtgttaataaaatctttcaagagaagctttcaggtaaaaatgccgatcgtcctcaactgaaagcaatgttagactatattcgtgatgatgatgaagtagtggtactgagccttgatcgacttggtcgcaattctcatgatttgactgacatcatcgaaaccattcggcatcgtggagctcaattgaacgttctaaatctacctagctttgcaagtattgaagatcctaaccttcgtaacttgattacgacaattattgtcgaactatatagtggctgttgaactaggccaccatatcttcgacccttgtagtaaatttatagcgaatttgataggcctcaccctcgaatttagccaaaattaaaattggtatagcaaatacccttaacagggtcagcacattgctcaagacgatggccgcgtcaatcttgacggccagtgattcagctgtccgagtgttcaccaagccaagccccagcgtgcccttcataaaagcaaaccggcgttcaatggtacctcttcgattctcggcatcagtatcctcacgccgtttcgctgcatcaacgtgttttggatgccggccaagcttcggaccgcagattcggatacccaaatccttacacagctttaggttctcccgattacggtacagcgtatcggccagtacttcatccggataatgtccatgaaggtcgtaatagtggtctaaagtttccgcgaagtcttggccctcagagaatgcggtgaaatcaaaacgttcaatgtcgactacgccttcacttaacgaacagtcaatcttcgccccaaattcaactttagcattggccttaccacgttgaattgggcgaatgtacggctgttggagactaacaattcggtcttcaacgtggtgagtcttgtgggtatacatgtaccattgctggtcaaatagaattcgaatcacgcctaagcgaatcgcttgttcatctggtagagtcgcaccctgatcgatgaattcgttgatgtaccgcaaatcacggcgcacatattgaagttgggccttgacctgtttatgaaagccaccacgctgttgctttggatgtcgtgaaaatgaggtccaacaatgcttcgcctcgcgtttgtacatgcgtgggtttggcacaccaagttggtgtgccatatcgatcgccatcgcctcaagattcagccttgcttggttgaggaggacggtgtcttgaggatacttgattttgactggcactgcggttgcgtccgtgatgacggtgtccactttgaatgggaccaacgcttcgatcttggcgcgtactgtatcattcatgatattcgtaatcagctcggagatatcggcaattcgtttgcgaaagtgtgccaggctggaataattaaacggctcaaccgctttgtattcggacaacccgatgaaatattgaagtgcgggtgtatcacgaattgccgcaaccaccccacgatcagttaaacccatccgttgttggatcaggattgccccatagagtaaacgaaatggttttgccgcacgtcccgcatttttggtgaactccaattggtatgcctcatcgagagctttccagggcatgacctccgccaactggacccactcattgttagagctaagtggggtacttaaaccggcaccaaaggattcaaatgacaattgaagcgggctgtgacgatagaccatacgataacctccgagtagcttcccaaaaaatgcaaggaaaatgcaggaaaacagctaattccaatggatttattataccgcaataatgcatatattagcttaactgcctgaattatagaatttttaagcagccactatataagtatattgctcaagaagagcgcgaaactattaagatacggcaacaacaaggcatagaaattgccaaacgccagggcaaatataaaggcaaaattcgcgaatatggtcctcattcacctaatcgtcaaaaacgctatatttataaagaagcctgtcgccttttaaataggaagaaagacggagatgaaactctgaccaagcgacaaattgcccgcatgttaggtattgcaccagtaaccttatatcgcattgaaaagtatcaggcagaagatctagcaaatgttccccgtagtgagaggtaaacatcatgatagatttaaggggcaaacgaattctctttacaggccgtttgcgatcttttcgtcgtttccaggcacaacagttagcaactattctaggagcaaaacctgtcaacgggattgacaaaaatgtcgatatccttgtggttggtattattagcaaaccctatgatcaactacttaccactcaaaagttaacgtatgctagaacctatggcattccaaagattgacgaattagcctttatttcatggtgccaatggcgattagatcaattgaaaacaactctttaagtaccttcttatcaaacggggagattagtatgcaaaagcgtatcgatttggccaatcaaacgtttggacgactcacagtcattagttttttgggaagcagttctaatggaaacgcgctttggctctgtcaatgtcaatgtggaaataaatgtattgttgacagtcaacgacttcaaaaaggattcactcgcagttgtgggtgtttgcgatcagaaataagcagatcaaacataaaagctaataaccagactaaaaaatacatgggcaatcccaagaattttcaactaattaatcgaacaaatttagttgcttctacacttaaacgatccaataacaaattcggcatgataggtattagttaggctaaaacgactcaaaattaggtagcacgacttcactttcaaagccatcttaataaaccgtgtatatgttcatgcggagggtgcaatcgctgctccaaagacagcaaaaaaggatatcattcctttgcaagagcaatataatcaatcacaccaacaaaattgaacaaattgatcagacaatccgagtaggcgcaaatcccattgcttatactgccgatgaacctatagaaaaggcgcttcgtcataaaatggttcagtactgtaatcctccaaatggcataaatattaagactagttttcaagaaaggaagccgtaacgtgcgtttatggcatcaagatttaattcagcaactcccaagacaacaattattgggacagcatcgtgaaattgcggcgcttcgcggtaatggatggggacggaaacacgctaccgttaattacgtatttgcacattccccatataaattatttcaatttcactgtattgtgttacgtgaaatggaaaaacgaggttatcatccagatcagaaatggtatgatcctctgtatcgaggtcaacattgcccagcatacaaacaactcaatccggttgcactcacaatacccatctatcctgagcatgaccaacgatataaacatgtttgcttaaccaatttacaaaacaagggaatctttttaaaccttccgtgatcctagtctgcgatgttcatcttgggacataggattgacaaaatagtatctcaacaatatatttactcaaagtaaataaatagccagtattacgttgataggagaaaatcaaatggtaaaccttacagaagaaatgaaaaatatgttaaagaatcagctcccctttctagcaacaacaggaaaagatggcaaacctcaagttggtcccaagggttcactacatgtcttagatgactcacatttaatctactttgagcacacctttaggcaggcctataataatctctcgaacaaccatttggcggcggttgcggttgctgatagaggcgctcaaaagggatttcgctttgagggaacggctcatattcatgaagcagatgactttgctaatcagatcctagataaaactaacatctttgatcgtttcccacgcgctggcgtggtggtcattgatgttgaacgaatctataaattggataataccttagaagctggtattcaaattgcctagggtttttaaaacaaattcaaccgagtaagtcgaagaactttttagtgtccaaactcatacagtgtttatttcatgtcattaagtattcattagcaagcagttttgttatactttggttagaagtgatagaagtacgtctaattcttaagaaacccgtagcttactgttaacgccattacttcgagcgtgtcgattttcgatacgcctttttttgtgttattggataaaaatcatccaataaaaatggctctacgtcaactggtgttgaagaataaatttatcatttgaggcggttctccatttggggagccgtctttgtcatgttatgccgtgatttggtggtagattcgtttgaagggatctggtgcaaacagtctgagagatgaccatctaaccagctattgatcctatgttgaaggttatgcagctaacaatgcttctaactcgtccacgactgagaacccgatgagacttaactctcgtcgggttcttttgcgtattgcgtgaacaatttccacaccgctcaacgttgcactagcggttcgaatgctttgaaagcttgctgagcggacacgatgacgtttaatgaatcggtggtcctgttcaatcaaattatttcgatatttggaacattggtgggctgatttgctcaaatagtcttgctttatcaggtgcttcactgctttcagtgttgcccgatattgatcagtgactaatcgatcaggccgaccattggtcgtcaagagacgcttcaaaaagtgataggatgcggtataatcgcggtgttttcgtagctcaaaatccatggtcaaaccgttactgtcaatagcgcgatacaaataggcccaacggcctttaactcgaatataggtctcatcgattcgccaacttttagcgtgagctgtttgatgccgacgccatagagccttaaagatggggccatagtgatgaacccaacgcatgaccgtggtgtgatgaacagtgataccccgatcccgaagcaattcaacgatgtcacgatagctgagactgaatctgaaatagtagccaacggctactaagatgatgtccttttgaaagtggcgtcccttaaagtgattcatgcgcgcaatccctcgtttcttggcacccagtatactaaaatcaagtcagcgaggaaaatttgcaccagaacccgactgaggagtttgtcatgccagattatccaagcaatatttctcgagcgcaatttgcgttaatacaacctgatttagaaaacttccgcaagcatacaagaccgcgtcgttatgatctttatgacgtattcaatgccatcctttactcgcttactacagggtctcaatggcgtgaattaccgcacgatttcccggaatggcacactgtctaccgctattacaaaatttggtcaactaaagctgagcctacggctgattctttattggaacaagttttaaaaaaattgtcattgctcggcgaacttaccaaggacgttcagctttaacttcctttattatcgttgacgctcagagcgtcaaaaacaccgctactgctgaaaacaaaggttacgacgctggtaagaaaatctcggggattaagcgccatctggcagttgatatcaatggctttccgcaggccattcacatgacgcgagcgaacgtctctgatcgagacggggccagtgccatgatcgctttacatgccatgcatttacgccaggttcaaaatgtcttagttgatggtggttattcaggcgttaattttcagctcgatgtagccagtaatttaaacgcaaccgtgtaggttgcgaagcgcaatgagttgcatcgattcgaagtcatgccccaacgttgggtagtcgaacgatcttttagttggctagagaattgtcggcgactttggaaaaattgtgagcgtcaattaaccaccagtctgcaaatggtcgttttagcgtttttagcactattacttaagagattttagacagcttctaagcatctcaagcgcaccacccaccacaaagaacaatttccaacggaagattcactggatcgcttcctggtttctcagtttaatgtttataacgagaagtctctgaagcggatccaccgagggttcaaaggactccaggacaccttggaagcatcatttatttaagttagatacatattatatgtacgaaggcatttcatttacacaaaattcttgacactcccaaaaactcatctcctaaaacgacttagcttttaaagtcatcaatgtttggacttattcccgtacacagaatcgaactgcgtctagtcaccagaacgggaagcggcatttaatttagtaaattaaattgagtgaataatcgcactaatcccagtaatcataaagaataatcctactaggtaatagattgataagattgaaaaggcgggataaatcaataaaagaacacctaaaataatgccaattacggataaaatcacgtcaaccataaaatacttttcgttaactaacttgataatgttcgaaagccataacgatattattgaatccatcaagaacataattgcaaacgaaattgcaacaaatagaatgccaaactctccgttgaacaacattaaaattccgataataatgtcaacgaccgcgttaaaaacgacccatccagaattttctaaagcacctctaagaacggttaacttgtaaatcccggacaaaattgcggtaattgctgcaataacgactaccgcactgaaggttgctaggggatttcttaaagaaatgaccgcaacgaaaatacttaagatcccgacgacaaacataaatgggtcaaatctgtccaataacttattcatataaaattcctcccaataatgtacagcttttatagacatcagattgttggtcgtaaattaaataatgcttgaatttacactttaagtgcaacactaattaaataaagaatggcccatggccaaatttctgtaaaatgatgtttgcgaaaacaatcatgaaaggaatttagccatggatcactacaagcatattaccatagatgaacgggaaactatctttttaatgaggaatcatggaaactcacttcgtgagattgccagccatatcaagaaaagttactcaaccatttctccccagtttacaattcaagtgcaacaccctgacgactagaccataaaggccatgaagacctattcttgttagtgctagctaaacaagaaagcaggaatcttcatgacccactctcagactaacacccacaagcattaccaacaactcagttttagcgaccgtgctacaattcaggcccttcaggctgctggtgacaccgcgaccgtgattgcacagaagcttcatcgcagtaaagcgacaatctcacgagaaatcacgcgtggatctgtaactcagctcgactcgaagcgtcactcgcatcaagtctatcttgcggaaactgcccaagccatgcacgaccgtaaacgcgatagaaccggtcactacgcctttcttaagaccggccgtgcgttcttcaaggctctctccagggagcttactcgtaagcggcacgtacacagcgttgatagcttcgtacacttctatcgcgaccagggcaaggcttgcccttcaacgacaactgtgtatcgctacatcgacgccgggctgcttgagctagacaacatgacacttcccaagaagctccgacgccgcatcaaaggctataagaacgcccacaagcgcaagaataagaagatatacggcgactcaatcgagttgcgtcctgcggccgtgaatgaccgcacaggcgtgggacattgggaaggcgacttggtcaaaggtattcgcttagctgatgagccagcattaatgacgctcacagaacggtacagccggactgagatcatcgtcaagattcctgactatcatgcgggcacctgccttaaagccttgcaggacacgatcgacgactacggggccaaggaatttgagagtatcacttttgacaatggttccgagtttgccaagttatcagagattgttggaacccagatttacttcgcacatccgtactcgccttgggagcgtggcacaaacgagaacgccaatggactgcttagggaattcttcccgaaagggaagtctctcagagcagttaccctggttgaaattcaagcagtccaatccgcactgaaccatcgtcccagacgtattctgaactatcttcgcccatgcgattactaccgatgcatggcgtaacagcctagaccactatcaagaattcgttatcatcgttgcacttgacttgaaaattgaggcttttgattgataagttttagtaagtccctttgtttgaatgatcattatgtcgccctctctaaactagtataacgtaattatcgcatgtaaatctcatcttattatattgcacttcttgcgatatctgataaaagttgttcgcttaataccggtattacgggcgacgtctacatcactcatgcccgtctgataaagcttaaaagcatgtagtaagcggggatcatcttcggtatattggggtttgcgcccatgatatttcccctgctgtttggctagggcaatcccttgttgctgacgttcaatgattcgcttacgttcgctttcagcctgatacttatacagttcaatgatgaggttagtcatcagttgacgtaagttaggatcagcaatccctgtcatggacggtaaattcaacacatctagggtggcccccttattttgaagggtgttcatgattttagttaaatcctgattgtttctgcctaagcgatctaattcagtgaccattacaatatcaccctcacgaatataggccagcattttttgcagttctggccgattagtgttagccccacttaatttatccgtaaataatttatcaacgccttttaaggccgctagctgtcgatctaaatgttgctctttggaactcacacgagcataaccaattttagccattgtcagcacttccttttggacagttctaatgaacacttttaattcctagtatagcacagaatcaaaaaaggccactagggtataccctagtggctaaaagcaaataaacttggcattatgaaagaaggtcccctatgcaacccacaatcggtagtatcctcaaacagcaacggcagtcgcaaaagttgtcgcaagtccagccaacgtttgatcaactcaatgataaccccgaccaccacagggccgacaacgactgtgaatagatccttcaacaaagacaacaccccctttggaggcagctgcctagagatgattgtcgcatgacacttgacaagacacaaattaaaattaaaagatgaatcgatttattatcctgttatttcaaacagaacccttgttgatgcaaggcatcgagtagttcgctgcgctttttcggcgtatgggcggcaccgttagctaacaaatgggagaaggtttcttcgcgctgattggtatcgcgggtcgcatagtaatgctgaatcacgtggtcgtaatctgttagttgcgttttccagtcgtcaggtaagtgataagtattgtcgaagctcattaagctttgcggcatgcgcggcttgaagtttggtttttgatcgggatagccgacaatcacgccacaaatcgggaaggtgaggttcggtaggtgaagcagggagatcaattgttttggatcattgaggatactgcctaaaatcacggttcctaacccttgattttcagcggcatcgacgaggttttctgccgccaataaagtatccgatgcggcttggataaatttatccgttgagctgagttggttagggtggtcggcgcataggtctgcgcggtattgatccgccacgaaaatcaataattcaccattgccatcgacataagtttggtggctgatggcggcgatttgtgaacgcagtgcggaatcggtgatatgaataatgctaaaagactgcaagaaatgtgaggttgcagtatgttgggccacagtgatcaggcggttcaagcattgcgggtcaacttgttgcgtggaaaatttgcgaatggttcgatgatctaaaaacatgtaatcgcctccaaaataattatagtcgaagttttagctaatgtaaggaaagaattcgtggtcttgcaataccgtcgtcagcaaggtaagctcaaggcaaatttaaggaggcccaatgccatggcgatcaccatcactcgtgttactgaggcaaatgctgaagatttattatcccaaattgcaagaacaagttagccggggtgttgagacactcccaagaacagcctgttatcttatgagtggttcattgtttagcttacgtgttgtgctgaacgccgagtccggcgcacttcggtctcaaaacactcctgggggctacggtagtctagctttctccggggaagcccgttaagacggtcttgggtagccagcacctggctgggactaacatcatccagcgactcgccttttgggtagtcacgtctaatcatgcgattgtgggcctcgttggagccgcgatcgcatgaggtgtatgaatgcgcgtagaagatgtctgtatctgtgtcctcaaaggccttattcagagtcgagaactccgggccattgtctgcggtaatcgtgcgcagacagtcaccccactcaagcttgatttctcgtaacgcaaactccacagagtccgagtctcggccgtcgatcagtcggagaagttggcaacgagtcttccgctcaatcaggctaaggatgacgctctcacggccattgcgtttcccgacaacggtatccatctcccaatgtccgaactgcttgcggcgttcgacagccttaggacgctcctcaatactgcggccggctaggcgcttatgcttagtgctcttgtgttgcttggtccgccgatttgccttctccacgagatcgatgttccgaatttctaagcgttgatcatcgatgtagcgatataaagtggttgtgcacaccatctcctcaggggtgaatagcttggctcgccgtgcggcgccaacggctgcatcaggcgaccagtgttcagtcttggcctgattagcataccaggccaggaagtggcttgtagcggcgaatttatccggcctatgacaattcagacgtgcggtctcatagcgcgtctgagcagcttcaggactatattccgtatgatagatcagtttgccattaatgcgcttagcctgcttgacagtccctcggtcaatctcattattgatggtttgatggcagacgccaattttggcagcaatttcgcgtttggaggtgccgggggcgtaaagttctgcaattctaccgcgttccatttgagacaaatgatgacctggttgacgacgtgtgatatcctgttcatgcatcaggacaatacctctttcattgtttgtgttggaacttcaatgatacaggatatctgttcttgatgttttttattgtcccaaatttgtaataaaagtggctaacttgattttaaaacgcgcggatgaaaatttttgaaagctcacaataaatttcctttatgtaatgatcggcaagaatatataagttaatacctagggctaggggtgaaatctcacggtcataataggggctgcgaacatataatgccttcagaacggtcatcacgcagtgtccgcggcacaggtgcacctgaacaacaaatggcctttcggccactacgaatcaacatctggtcaacaccactgctcgttttaaaataccattctcctggagaaaacaatggtctttatgaagttgcttaagctgatcattagccatagcacctactattgacgtatgaacccatttgcaaatggaaggcctgttttgagttgaacaactcgcacaaactccactctgaagggaaggggctgactaaaggatcctttttgcaatgtcaaaatatgcataaatccacacggtcgatgagccttcgtcctcagtatgagtaagacataagttaaaggcgccatctgcattcttttgctcaatcaagttacgaatatccttaattactttttgcaatgctttttcataggctccacccattgtgagaatagctagtccgctttccgtgacataatcgttttctataaattggaaacccaagggaatgtccccggaagacaatggctttatcttatttttaggatatttgagctgactaagcgttatcagtgcaattgctgtttcgttattttctaggtttagtgtctcaataagcgctttgttctggttctccagtgcatggttattcgtactttcttgcggttcactgattggtattggttcaggtttggctagcataactctttctttattcaaaaaacgatttatttcatttgtgaaagtggtttccagaaagcttttgtcctctttcgagtcaaagtatagttttaaatttgcttttggttgaaaggacaaaaactgtttgccactaaacaatccttccgtcttaaatttaggggattctatgacgatgagccgcacataactgagactatcctctattatttgctctcctaaaattactttccatatatgatgtgccgttaaaagaaaaatagtattaacttggtcagacaccgtttgaaaaaaggccactgtagctacttcattaaatgaaaaatcatctggtatggagttaacgttttgtttaaccatatgatgatagtcatccatttcccgtgaaaacttgttcagattatttatacgatccacaatgttttgaagatgagatagtcgtccattagccttgatatcaggtgatagcgttaatcgtatagacatttataaacatcctttcttatcaatccgtaatactgaaattagtgattaatttggttctggtacaaattctttcatttgcttcgcgtatactaaactagtgaatagattaaaattggcggggaaggactatttttatgttggagctgtcgtttgaaaaagaagtcgttaaaaccttaacaaccgggaacaatcaatgggtggagcgaaaagatctatatggtgccactcctgatcaattatgggctaattttcgagataagttaaacaacaataattatgctaaattgcaagggcagccattaactgatactgaatttaatcaagttaaacgtgctattgaagtccggacaccttacgaagcggctaaattactagccgccgaaaatggcattggcaaagtggaagttgaacgtgatgatgctaagctgggcacggtgacactcgagttattttggaaagcggacgtcgctggcggtaaatctagttatgaagtggtccgacaagcagtgcgaccacggttagctggtactcaagatgtcgatcctgatcgccgttttgacgtaaccctattgattaatgggttacccttaattcaattggaactaaaaaaagccacggtcgaacttaaccaggcttttaatcaaattgaaaagtatgcgcaggaaggtaaatatacggggatttactcgctgctgcaaatgtttgtgattatgacgccggatagtacggcgtattttgcgaatgccgaaccggatcatttcaataaagcttttttgtttaattggcggacgcgggataatcaccccgtggaaaacgggttagcgttcacgcgccaagtccttaatattcccatggcccacaaaatggtcagtgaatatacagtcatcgaccaagagcggcaaagcttaattctcttacggccttatcagatttatgcgattgaagccgtgatgcaccggattcacgaccatcaggatggttttgtttggcataccacgggttctggtaaaacactcacctcatataagaccgctaaattagcggcgcaagatcctggtgtcgataaggtcatctttttagttgaccggcgggatttagacgaacagacaactagcaactttagtgcctatgctgccaatgacgatattgccattaacgaagcccaaaataccggtgatttaatgcgtaagttgcaacaaaatgacggtaaggtcttggtcacctcgattcaaaaacttcatcgggcggtcaaaaaaacgcaagcccagctggcaaccggtaagcaatcccgctttagtaagactttaaagcaacgggtgatcttctttgttgatgaagcccaccggtcgcaatttggtaagatgcaaaaggaaattcgggcagcgtttgtcaatagtaattggtatggttacaccggcacccccatctttaatgaaaataagaaacagctcaagggtgatctagcggtcacgactgaggagctatttggtaaagtctgtcacgtttataacttgcgagatgctttagaggaccaagccgtgttaccgtttaacgtcgaacatgtaacaacaattggcaaagatacgttaataacccgggccctcgagaaagaaaaccagcgcgtcaaagcacgtcgcgataagcaaggccgcctgctgagtacagctgatgaagcaaaaattcaagccaagattcaagcgatgtcagtaaaggacttggaagaaacgtatttaactccggctgactttgagaccgatgaacatattaaccaagttgttcaatatattttacaaaaaggcccgcgtaaaacgagtttgggtcatggcaactacaatgctattttgaccaccagttccattgaaatggcgcaacgctattatcaagcctttaaagccgcgaaaaagactactcacaatcagctagatcctgattggccccggattgcgattacttattcattaagtgaaaacgaagatcagagtgcgcacaaacatgaccaaatggccaccattttaaaagattataatcagcagtatcacactaattttgatttagccgatctgaatctctataacgaagatgtcgcaaaacgggctgctcggcgtgaggcggtctttgctcatttgaaacccgatcaagaaattaatttagtgattgtggtgcggcgattattaacgggatttgatgcccctaggctaaacacgctctttgttgaccgcaccttagcttatcaagaactcattcaagcctactcacgcaccaaccggctccaaaaccgggaattaaaacaagaaggccaaattgtgacctttcgggtgccagcaatcatggaagcgaatgaacgtgaagcttacaagttatatagtggcgaaggctcttttaatgtcatcattcgtcccacttatcagcaggccgtcttaaaatttcaaaaggccgtggtcgctttaaaaaccattgccccgacgccgacggcggccgatgacctgaaaggaaccactgccaaggtacagtttgtgaaagcctttcgccaagtgaatcagcaattgaattccttatccatgtacaacgatttcacttgggaaaacagtgaaaaggcctttggtatcgctcagcccgaagtagaatcctatacgggtaaatatctgcggattaaagcggcggttactaaccaagagcctgagaaagtccccgaagaattagctgccttagacttttccctagccgttggttcagtcgtcttggtggattatgattatttgacgcaattaattcaagattggattgatgaacagcaacagtacacgacacctgatcaagcccaagcccatatgaccgattacctgcaaaatagtgccaaagtacaggctagtttgaataaattagcggaaacgcaaccgcaacaggctcaattaattcgcgaagccatgccttatattgagcaacaaatgcaacagtctcagcaacagagtgaccaaaatcaagcgccagtagcgttgaatgctcgggagttggtggccgcttatgcccagaaacaattggtccaaaaaacgacggcttttgcccacacgtggggcctagatcaatcaaccctattacgggtggcacgtgaacacaccgtgggtactgatgaatggcatcatgaacaagaattaacgcagtcagcgaatttagcagcggccttacaagctcaaacagccgctgggccgaagattccagctattttgccactataccggattaagtcccaggccgcttggcggcagtttattgaacacgatttagcaatttatctacaaaaataagtgaggttaaacaatgtcagaaaaaacaactcaagctagtcaacttgaaagcgccctatggaatgcggccgatgtcttacgcgggaaaatggacgcttctgaatataaaaattatttattggggttaattttttatcggtttctatccgagaaaaccttaacgacttttagtgattgggcaggcgaaaccgaaaatgtcactcagaaatatgctcagtatatggatcctcagttcgagttggaaggcgtctcggtgcagcccagtttagtggagtatttgcaaaacacgctaggctatttaattcaaccccaggcgttgtacgctaccctgattggcaagattcaagcccatacttttgcgttagacgatttatctcaagcacttcatgatctggaacagtcgacacagaatctgtcttcagcgcaagacttttcgggattgtttgccgatgtggatttaagtagtaataaattaggcagttctttacaacaacggaatcaaactatcagtgataccatgttagctttaaatgcgattgatctcgttcatcatcaaggcgacgtcttaggtgacgcctatgaatacttaatcgcgcaatttgccagtgattccggtaaaaaagcgggtgaattttataccccacggcaggtgtccgacattattgcccagattgtgacttatcagcgcaatgcaggtgaccaccaagttcgaactatttatgatccagcggttggttccggttcactgctattaaatgtcggacagcacgtgcaagaccccaatttagtgagttatcacggccaagaattgaacaccacgacctataacctggcccgtatgaacctaatgttacatggagtctcgtatgacgatatgcacttacgcaatggtgacacgttaagtaaagattggccggttgacgaaccttacttatttgatgcggtcgtcatgaacccgccctactcggcacactgggataacagtgataaacgcttgtctgatccccgcttccgcgattatggcgtcttaccacctaaatctaaagctgattttgcctttctactacacggtttttatcatcttcaagaacatgggactatgggtatcgtcttaccccatggcgtattatttcggggtgctaaagaaggcaagattcgtcaaaagctcctgttagataaccggattgatgccattattgggctacccgctaacatttttcattccactagtattccaacgttaatcatgattttaaagaaacacaaaaccactgacgacgtcttgtttattgatgcgtcccgggaatttgaaaagaacaagaatcaaaataagctaacggcagccaacattcaaaaaattgtgaccacttatcaaaaccggcaagatatcgataaatatgcccatgtggcctcaccggcggaaatcaaggagaatgactacaacttaaatattccgcgctacgttgatacgtttgaaccggaacccgagattgatctgaaccaaatcaaagctgacctaaagcaactagaccaggaaatcagtcagaatgaacaaacctttaatgaattagctagccagttagtggccacccaggaaaatgaccagtcaaaaccggaggcccacaatgagcgctaaccaaactaaatatccgcaattaagatttaaaggtttcactgatccttgggaagagcgtaagctagcggatgttgtttcaatctcggcaggtggtgatgtagataagaccaaactaatcgaagatggtgggtacccagttcttgcaaatgcactaacaaattcaggtattgttggatactatgactcatataaagttgaagcacctgcggtcactgttactggtcgaggtgatgttggtcatgccgttgctcggcatgtgaacttcacgccagtagtgcgtttgttgagtttaaaaagtgaagtattggacgctgattttcttgccaatatgcttaatcaaactaacatactagttgaatcaactggtgtaccacaactaacggcgccacaactaggatcgtataagattttgtatcccaatttaaatgagcagacgaaaattggaaagctattgaatgctttcgacaaccttatcgctcttcatcagcgtaagttagctaagcttaaggaacttaaacagggctatttacagaaattgtttccccagaatggtagtaagttcccgcaattaagatttgcagggtttgctgacgcttgggaacagcgtaagttgggagaagaagcccaacttaccatgggtcaatctccaaattctgaaaactatacaaaaaatccagatgactacattcttgttcaaggtaatgctgatatgaaaaacggtcgtgttgttccaagagtttggactacacaaattactaagaaagctgaaaaaagtgatttaattttaagtgttcgtgcaccagttggagatattgggaagactgattatgacgtagttctaggccgtggtgttgcagcaattaaaggaaatgaatttatcttccaacaacttggaaaaatgaaattaaccggatattggactcgttacagcacaggttcaacatttgaaagtatcaattcaaacgatattaaagacgccaaaattatggtaccagttgaagaggaacaacaaaaaattggctcatttttccaacaacttgatcaccttataactcttcatcagcgtaagcttgaaaaactccaagaacttaaaaaagggtatctacaaaagatgttttgctgagcttaatttgatcgaatttaggatcctatgaaaccccatgacttagtttttattgtgcttggtcaacacttaattcacctgtataatggattacgcaggaagttttaagggcggtggctgtcttttcccttgcgaggtgaggcccatgggaacatggaataatcttcaggaaggtttcacagtcaatgagcgtcttccagacactctcgttgatgttgctgtttggcacgtttttaatcgcgctcctcagctatatcgacaagcaccacaaataaaaaaagccgccctgtgtaactttggtagaggtcacaggacgagctaaaatcgtttattaaatttctgccaccgcctttgaagcggcttgcacgggaagtcctgttttcggcggggcttcctttttctgtttccattatagcatgtcccttaaaaactggctaatgttttagaacctgtctagtatcttttaagaactatcttcaggaaggccaatacaaccatttgaagactgctgttaagggcgcgttcacagtttttccaaagtcgccgacatttgtctagccaactccatgaacgttcaatgatccatcgttgcggtaacaccgtgaacgtatgcaactcgttgcgtttagctaccgtcgtcttagcattcaaaatgagcttcacctgatccgcaaagtcattgccagtgtagccaccatcaaccatgacatgctgaaccagctctaaagtttggctagccaaactaaacatagccaatgcacctgaacgatctgatacattagctcgtgtcacgagaatggcttgtggtaaaccattaatatcaaccgccatatgacgcttaatccctgaaatctttttgccgccatcgtagccactatttttcgttaaatcagtggttttaacactttgagcatcaacaatcacaaacgacgttcggaccgatcggccctgtgcaaaacgataggaagcgacagtttttttaaaagcctttctaatagcgaatcagctgtcgggtctggtttatctcgccacatatcgtaatagcggtagacggtatgccattccgggaaatcgtgcggtaattcacgccattgacaccctgtagtaagcgagtaaaggatggcattgaatacgtcataaagatcataacgacgcggtcttgtatgcttgcggaagttttctaaatcaggttgtattaacgcaaattgcgctcgagaaatattgcttggataatctggcatgacaaactcctcagtcggttttccacaattctaccagattcagcagatactagacaggttctaagtgaaatccagcaagttagtaacaaagtgattgagcttagcgacgggttaaccaaacaattaggcttacaagaagcacaaaaagaacctgagcatgatctaaaaaagctatcagctcaggaacttaataagtcctatcaaggcttgcaacaacaaattcaacaaacaactagtccacaacaaaaagcgcaattaaaaaatcagttaaacgatgtgcaccaagaaattagtgatcgaactcaaaaacaactgaaagcatttgctaaacagaatccagaaattaaacaaccagattctgaacctgatcaaagtctaagaacctgtctagtatctgctgaatctggtagaattgtggaaaaccgactgaggcgtttgtcatgccagattatccaagcaatatttctcgagcgcaatttgcgttaatacaacctgatttagaaaacttccgcaagcatacaagaccgcgtcgttatgatctttatgacgtattcaatgccatcctttactcgcttactacagggtgtcaatggcgtgaattaccgcacgatttcccggaatggcacactgtctaccgctattacgatatgtggcgagataaaccagacccgacagctgattcgctattagaaaggcttttaaaaaaactgttgcttcctatcgctttgcacagggccgatcggcccgaacgtcgtttgtgattgttgatgctcaaagtgttaaaaccactgatttaacgaaaaatagtggctacgatggcggcaaaaagatttcagggattaagcgtcatatggcggttgatattaatggtttaccacaagccattctcgtgacacgagctaatgtatcagatcgttcaggtgcattggctatgtttagtttggctagccaaactttagagctggttcagcatgtcatggttgatggtggctagactggcaatgactttgcggatcaggtgaagctcattttgaatgctaagacgacggtagctaaacgcaacgagttgcatacgttcacggtgttaccgcaacgatggatcattgaatgctcatggagttggctagacaaatgtcggcgactttggaaaaactgtgaacgcgcccttaacagcagtcttcaaatggttgtattggccttcctgaagatagttcttaaaagatgctagacaggttctaataccgcgatcatgtaacaatttgaaaatattggccatcggagcttctaagatgatgttcttttgaaaggagtattccttgaagtgattcgtgcgtgcaatctctcgtttcttgacataaagtatacttaaatgaagtcattaggcgaaattttcaccataatctattttgttaacccaatgaatatggcgccaccaataatcaaaaatagcccggtaattagcttgcggtgctgctctccagcatgttcatgcaagattacgattccgccaatcgttgagacaacgacgttcatttgcgagagtgtatacccaatggagacaccattcaattcatttgacaagagcatcgtgaggttggcgataccgaaacaaaatcctgtaataatattatgccagctctttactctccacatataattatcccgcactcgagatacaattccggatatcacaagccacatcgctatcgcttgtggcaacagcatgtcccaaccattcagtccgaatattcgaggtataaccgcatagccaactagtccagctgaagaaacagatactaccacaattccatttaagaagtcttgtggagagactgatccggagtcttttccacgaatagagatgacaataacgccaactatgataagtaaaattgccacaattccaaataggtactgccttgttgtatgccattcgtgaaaataaaaaacaccaaatagaattgttccgattagctgttctgcggtattaattggcattgccatagatacacccaagagatcaaaggaacacacttgaagaatctgtccaattccccagaacacactacaaagaaccgctccgatgattaagcttggtgtcaaagaagcaggctgccgaaagataaagataattgccgcaaatatcagattacctgttaccatacccattactttgttagtgaattttccaccaacaatttgcataacaatggcctgcatgccccaaccaagcgctggaaccagacctaatagtaggctgctcaatatataactctccctatatatgtaatctctagaccgctcacccctaaagcagtcgccattaagcggtccggatatttataataaaagagtacctgcctatctagcagatactctccttttcctaaactccttgaatcaggatggtcaagacgtcataaggcggaatctcatcattgtaggcaattggctcctctaatgcattaattgctgactcgccttctcgcaattgataagtaagcggacgttttgtcatattctgtaagcgcatcacggttgctttttctgtatagtaagcgggatagacagcactaactgttaattgttctgagacttcatcaaagctctggcttgatggcaagctttgtttcgtagttaagctatcctgaagtttattatccaatcgattgaaaaacagatttagattctgtttctgataagccaaagggttaaaggccaaccgttcttgctccgtcgcgattgttgtttcatcagtcgcggcaccccagaagatatctacgttataccgcaggccttgattcagaatctcagcaccgggtgttgcaatcatgatatgaccctcgttcgtggtatcgcccgacgctctcccaggacgataaataagattgggtttcccaagctgatctgacgttgccaatagtgtaaattctagctgaccgccactttgcgcatattccttaatctctcgactaaagacggacatctgcgcatcgtctcgtgctaccgagacattgttatccattggccagatatttatcggcatctctgcatatttagactgccattccgttggtatcttcttgttcttccgagtaataaaaccatacggaacagaggctttattactatccacatctagtcctgaatccacaaggaggcgcaggcgatgttgtaagatatcattctgaacctctatcgcaatactcagatgattatctggggaaactctcaagtccatcactatcggtagcctaccggaattagtaccttgttctctttcatctaggttgagaggtaacttggcatccgcacgcaaaatcatctcttgccaatccgcttggtgctccgctgacacactatcccactcaattagcacagggtgatcgttctgtacaggtgagaaatcgtatgtgtctccggcattgccatcatcaacaagcttaatggcattcttaatgtgcctaccttgccaatcaagatcgattttcccatcgcgtacactaatctgccaatcggttgtcttaagtacgtactcgtctgacgattcggataatgagtcaacgttctcatcggtcgaatgaaattcaatcactcgatatccgagagcgggtagacttacgacaatctggaaatcatcctcgtagtatcctggctccgtgagatactcgttgccatgaggggtctgacttagaacattctctctagcaggaatgtgacgctgatgaactaggtgttgagagattacgtcatcaaactggatatgctgataatttgttagtagcttaacgttcacaggctgagtgcttgtcttaggaagtgggttaataagcaacacctgattatcgcctagaccaagtttaatactcagcatcttttgaatcgtattgagaataccatcagcaatttcttgtccttgcttaagtcggtggagaatgtcctcattcaccgaatctacaacgctgccggccatactgtcatgggcttgactctccagtaacttcttccatgcagatacaagaacacccgtattcaaatcaattccaactcggtggccaatgaccattaccggttcaacctcatgaattaaggtatgctcaagcttagttgctgcaagcttgacatccatgcgacttgagccgcacgtacgatgaactcttgcaaacaccggatcaatgagctcacctttatagtgtggtagctctttgtagtccagactgtcaaagaagtcttggtaggtacctatcttgtagctgtatttgcctatactgttaatctcttggattttttcttcaatatccgccacgatattcatctgatcgttaccgcttggaatcaggatgttatcaggcgtattaggaattgtttctgcgataaagtttatcgctttatcaagcctgccatctacatactcatgagttggtgccagcaacatgccggtgccataaccttgaggcatagacaccgcttgaactgtcgcccctccgcctagactatcccaattaaagtagaaactcgagacctttttaggatcaatcccccgccagaacaggaatcgattgagaccaagttgacgtagaatcacaggcatttgtgcattaaagccaaatgtatccggaaggtagcctattggcatagactgacccagatgcctagttaacaatgaaccaactataccgttccggagcaatgactctccttggatgtgtagagcatcaggttgtgtgtaccaaggtccaatctgcagttgcccttttgccaccagttgctttacgcgttcttccatctctggaattatttgtaaataatcagacagtattgaaatctgaccatctaaaacaaagcttgcatgcgggtgcttctcaagctctttaattgtattcgtgaagagtagtgaactcagtactaaggaatcctggtctgaaaagtaccattccctgtcccaatgcgtatgattgactattgtaacttgcttggacattattaattctcccactgatcctcatcaaagtagctaccatcgttctcagcatccgctgtataagagagtttttcagattccgcttcaaaagccttgcgcgtcgcaagtgtaattgctgtaacaatgagcgttccaacagcgatcccgagaatgtagaaccaccatttttcaacggcaaaccaaccatagaaaccagatattggtgctcggttaacggcaccaagaccgacaccaagcgctgcgccagcggctgagccaatcatattagcaggaataaccttcagtggcgattcaaccgcaaacggaatcgccccttcactgacaccgattaagcccatgaccaatgacgcttgacctgcttcatgaagctctgggctgaacttccgcttgtcaatcaatgttgcaagccctaaaccaagtggtggaatgataattgcaatttgtgctgcggtattcggatcgtagacaccacttgtgagtaaagccatggctgttgtaacggcagccttgttaactgggccgccaaggtcgaagccgaccatggcaccaacgattgcggcaagcaatactttgttcgtcccagtaaggctcttcaaccagctagcaagaccagtgttaattcccgcaaaaggaaccccgatgacatactgtatcagtatcaatgtcactaaagagccaagaacaggaacaagaaagacaggtaagacggacttagcagcttctggaagatgaatatgcgtcaacagaaacttaaccgtataacctgcgatcaagcctgaagccaaagcaccaaggaatcctgcgttcatattcgcaacaaggacaccaccaacaaggccaggtgcgataccacctttatcagcgacagaatatgcaataaatgcggagataactgggaacatcatgccaagagcaagtccgccccaaccatcgtcagtgtgcaagaactgtataaaccagtttgcattggttgcccacttagtgtcccaaatatctgaaattccatagaatgaagcgccaacacgactgattgccatcaatacggctccggcaataactagaggaatcatgtatgagataccagtcatgatatgtgtttctatatctttaccaaatttcttcatggacattagaaattcaactcctatcctttgtctgcggcgtcaagagcgctgttaatgaccttttcggcgtccttgattgggtcgctaacgttaacttgaagaattttctttccatcaaagcgatctgcatcacgtacttttgtgtctgtggcaaagataacggcttcaccgatctgaacgtcttttgctgtcaatttgttcccaataccagtcgcaccttgagtctcaaccttcattaggacgcccatcttcttggcagcctttaagagtgccttctctgccatgtacgtgtgtgcaacgcccgttgcgcatgctgtaatagcaattaactttcgtgccataatatctatctcctcaattaaaaatttgacttagcgaaaataccgaatcggctttgctgagtgcctcacggacatcatcatccattaactgactagcaatctccgagagaatcttcagatgttcgttatccccaccctctggaattgtcagtagaaatacattttcaacaggctcattatctagtgacgcccattcgactgggtgtttaagtttggcaattgcaaccgcagaacgtgtcaccacatctgacttgccgtggggaatggcaataccatcgccaatacccgttgttccttctgattcacggtactcaactgcgtcaagatatgcttgcttgtctgttacaatgccagctgaaacatacaagtcggcaattttactaattgcgtcttttcttgtattagcatcaagaccatatacaattaggtctttatctagtttaattgtcattattcgattcctcgtttcagtatctctattagttcttttttgtcagtagcttttgtcaacgcgtttaacaaatttgtgtctgcaacgatatcatatagatcatcaaatatgctatctatttgctgctgattcatcttcttagtcatcgccaagaaaaagactactgatactttgtgatgtccccaattaatggggtgctcaagggtacaaattgcaattgctggtgcctgtactaattctggttgtgcgtgaggaatcgcataattatcaaaacttgtgaacgaaagattctctcgttccaatgcacttgctgtaagaccttcatcggcgtatccttgctgctctaaacggtaaccaagattttgaataacctctttccagctccgtgcgttactggcgagccacatcagatctccgtgaattatcctaaagaactccgcatgtttgttgttctttttatcttcaatgtttctgactagattcctaaccagtagcgcatcgctatcgctcatcactggtgaaacagtcaccgttggaatatcacccttaggtaatctgagagttgagataattagatcaatacctacgagactgttgcgctggaagtcttgcaaggaccagatcttaacaatcgatatatctgagaattctcggcgaattcgcgcggccagcagttgtgctgatccaagccccgtactacatacaattgcggcgttcactctctgatgtatagcccttcggcgttccagatatgcctctatatggagtgcaacatatgcgacttcatcatcattcattgagatgtgttctgtacgttcgtagtcatcagaaacgatgagtgcctcatcaaacgcttgtggatagtttcgtttgatatcctcggtatacggatttgagatgcccgcattaactctgagtcgcttcacagctgcctgcatatgaacagttagaccaaagagcagatctcgatcatatccgaacggatgaagaagctccttcaaacgttcaggaattggtatcatactatgctgatttgcaaggcttacctggttcgcagatgctgaaattaaatgaatctggatataagcaatctcctcatcaggaaggcgaacattaacctctttctctaccatcgctgccagctgcactgcttctgacttacgttcattcccgatacttcgaattagggcatcattttgaccaattggatttcccgcttttatcctattgatggcaattgctaagtgaataactagggactgaatcgcatactcgctaagactcagacctagtttctcagacgcattctgtacgactcttgctagtatgttaacgacgctagaatcaatatttggattttccgcaattgctggatcagcagtccagccttctgatgattgatccatacgccagtcgctatcccaatattgactcaacatcttaaacaataccttgcgcttctttccctcctctccttcgattcgaacaccacgcccaggtgtgcgtaataactcggtatctgtatctattaactgccgattcagattatcaagatttctttgaatgactctcctactgataaacagaacctctgcaagctgatcaattgagatatagtcttgtgatcgaagtaacttggataggatatatcgctctctactacgatcagaatcaggtaacatcgtcttttctgatttcagtttccttaggatgttctggatatccgcatcttttgcagtcaccgtaatgcccttacgaggcgttacggtaatcgtaacttgatcatctcttaaggccagaacaatctctcgtaaatccgaataaactgtcttccgagacacacccacttgtgttgccagctctgcagcagttgtattgggcgtggataatagcaatctgacaatttttctctggcgtgcacttaaagtggtcatattgttccccctatccaaagtctattgtgatatttaaatgcagtaatgacaacgcattcattttccacattattgtggaaatctagtgaacaataagcatcggtatccagtgaccgttgaactaagctaccctatcgtagatctttgtagtaagtttataattattcatttggcaatccacattcctatttttctgattaaggtctctggcaaatggatagataagatgttgggtgttgcttcgaacaaatagagctttaaattgtttgcacttggcaactcatgctataatatatatagcaaaagagcgttgcatctatcgacacaacgctccctgcaagccgcttcaaaggcggtggcgtttacaacatcaacttaattaagccaacctgtaaccgaccaaagttacacagggcggcttttttgttacttctttttgtcgttgagaatggttgcgactaataagccgaacgcaatcatcagccacagtgcctgaaagacactcataggctgtgaaacctttctgaagattcctccatgttcccatagacatcacctcatcgggaaaagacatccaccgcccttaaaaattcctgcttaaatagcataccacagcttacttatcatcaccggtgttttgcacggtatctttctgactcaatctaagaatttctggtaatagaacagtctctagctcaatataaagttgattagctatcataccttcgaacacatcaggtacaacatctatctcagtttctaattgtttgattagatgccgtgcaatgtttggtgattgggtatcgatggcggtcttaatttgttgctgtaaatcattcaatatcatcaaatcacgcttctttcattgaaatgaccttgttaaattttgatttcgttcacgctaaatgcgaaccgagacttgaacacgtgattatagttgttttaaacttatctaaggtaacgaggccgattgatttttttagttgaacacgcgaaacgttgattgcgtcgctgcagccgttttaacaagatcagcttgtacaataaaacgcttgggcgtattgggtgtttctggatcacaggtaactaaggttaacaacttcttacctggaacatcatcaatcacggaaatttgatgctcatcaattgtctgtttgtttgtgacttggtacgtataaacttgctgattatcaggcaaataaacatgggcagctgtctgaattcgtttaagcggtgaaaataagttgcctgcatcggtcatataatggccagctaaagcataattaccctttcccaggacttgattaggtttcatcgtgccagcccctcgagccaaattattgttatcaagatcgtaaaaaacgggtaaacgcgtactaacagaaggaattgctaaccgatcaatggcgttagaatcataagtcatagccttagcgaccgtagtaacatccaaagatttaactttcttaaaatcaaaactccccttacttttttggggatcctttaacgaagcgtgccaagcactattgctaatgtgttgaacagtcagatttttaagttgctcattgaaaataatcgccaaactcacgattaacaacataatcaacaacgtccaccgcagccagcggtatttattttcccgatattgcataatagaatatcccttctaagttttagttcagaaattggttcaaaattggttcaatagacagcattttattagcccgggcgttctattactatgaatcttctggtaatcgctgaatcaacatgggttcgttcatgtctaaatatgttcttcgacttgtgtgtaaggtgttgccggtgcgtacctgttcattgatccagcgagtacagtccgaatgatgttcacctcgaaagtagactttaccagaattaaagccaacgaccgcaaatttaggctgtacacaagcagatgccaattttttaaggttagaatccgaaatactttcctcagagtttagcaaacgtcgcacagtacgatcatttattttagcctttctggaaaattctgggttactcagtttgttcttgtcaatatagttctggactattttacgaacggaatcacgatccaataaatcaggctcctctctattgaaatgaaccattattgtagttaattgttattcctgcttgcgtattaaagacccagacatttaagtgaaatttgtttgggttatcaatagactgcaccagaacatgtgtaccacgcggcacaagctcttgaccaacatatactggaatgacttgataagcgacagcatcgtcttggtgtgagctaagataattgcgcgtcagagtttccgtgtaagccataccaccgggatttcgttggtcattagtgccaacattttgagcacgagtgccaagaataacattatgagtctgcatattgccacctagtgaccacgctaacaggtggcttttattatacagataacctcgataaccgttaagttggaccattcggttattgttgctgcggccaaaccattgttgtaggttcttgttatacacgccatcagcgtactcaccggagaccttcgtggttttaggaaaggctggtcgcttgcgcacagagcttgcgtgactgtgcatcataccgtaagtaataatggcagagaccgtttgtgttctacccaagtcatctaaactgtcaaagtaagtttgagcgcgtgttgtttttgctttttgcgcggcagctaccgtttgcttaaaaccattttcaaaaattgggacattctgattaaccgttgtgtagttttgcggatactttgccaaatcaaatggcaagttggcaagctcactgtttgcctgcgcgtcctcagtggtactcgttgatacagcgtaggatggtgcagatttggttgtatttgactgacctgaattcgaaccctgaactgctgaacaaccactgatactaattcctaatactgtactgagggctaaaagccattttgctgttaatttcatagagaattcctttctgattcatcgtggtggccttgctgagcaagtaacgctcagtaaggcctagtttgcgtaggggcggcgggctcttggccgacccgaacgccccggcaacgtcttgtcgtttcaggataggtaactggcaagtccagtttatacctaaaccccattggttgtcgtttttcggctatcgtgcagatcatgtaagacttgtgcataatgcttgtggcgtgccgccacgcgttagaactcgttgatgcctatattcggcaaggagaagaaatcgaaagaggtctttaacagtgaaaactacctacgacgaaattgtgaaacagccatgtgacaaactcgcccagatcatgcaggacatgacttattgctacaacgagacggtggtacctaagaaacacgacaagaaacttctgacgaagcaacttgaagaggtcgtggctgacagcgtggctatgaatatggtcaatgcctactacaaaacacttgccgagttcaacaaaggtaatcgagagtggtttgtacttgctatcttgtgcattgaattaggagttaagcctgacaaagccagtgcgcaggaattaagcgccctgcagatgatttctagcaacattactggtaaccaagcaccgctactcaatccagacatcaagaatgcctttgaaggtgctatcaaggcttaaagagtgcaagcacaatctagtcagattgcgctttttctgttataatgagaatacaaacagggagcaccccgtgagagtgctcccctagcagagccgtttaagacggcggcgacatcgtggttaaataaccgtcagccggccaaagcgaagacggttattttttttgctgatttttaatcagctcaacaactaatgctatcagggctacgacaaacgtgccgaaccctagcataagctgtaaagcgtccgaaatggacacaaggcttctcctttcgttggtatcgtggtacgttggtttttacaccataagcaccacctccaatctacggaagtcgccaccgcctttaacttttctgccacgtttagtatagcatataattggcttcgttcctagaggcgcaaggcatacagctatcttgctaccgcaaaaaaagtctcttcgggcatctgcctgccgcgaggattagatccgatttcggcaacatgatgcaacggaacggcaaagcccagccgttctcgtcgccagctcgactgaaacccagcaggtagggcattacatactttgctctagtcctgatgcacgctgttttttccgctgatgttggggcttaaccggctgagtttgttgatacttctgctcatcttctttgtctacagcgttgtacccatactgcttaatgagataggcgcactgttgaggatcgttggcttcaaagtagcccacaactttatcaggctgtttagtatccactagcgcaaattcatcctgacccttatcaactagttgggccgtttttccatcttgacggcggtaggtttgttctaactgctgatccattgttgctggatgttgggccaacttggctaacccattccagtctttagcaattttagtcaccggaagaatgccattatcagcttgatagcgcgtgttgtagtaagaggacttggccgctaagtgttctcggtcatgatcctcaataccggagtttaacttctttgtaatggtatcccaatcaggctgctgctcactagtgcggttagctttgatgaactttgccgcggttagtaaagcctcatctgaattaaagttagtttttccggggttggggtcgatgagcacgctgcttttggcaatggcttgtggcagcggaaaagactgctggaagttcgttgaaaggttggttgttgctttaactgccgctgccaactcacgccaatcaatgcccgcctgattcgctgcttgttttaagtcttggtaagtcgcttgggtgatcgcattgtcctgtggaaagagcggcttaaaggtagttacctcggcttcggtattagctaagatggagtcttgcagcttgtcatagagctgatgaccagctgggtcattgtcggagccaacataaatagtggctggtaattgcccttttgttttatacatattgaccgccatattcaccacactttcaactttggtaccatcaactgaggcaatcatgcaattcgttagctctgggtgttgtgtccagtaactcaacgcgtcaattggtgactcaaagacatacaagtcttgaggtttccccaaactaaaattgaaaccaaaatcagattgtgagtttgcggcgatctttttttgcgtgccacgtttaccgtattgtttaaaatcaatttcagtgccttgaatacttgcgccaacggccttgccatttcgcgcccattgaaagatcagattgttttgtgagtcctgaaaaatgaggcccttttggtacaggcggtcaactagatgaggattaatccctctggcgatggtgaggtaatcccgcgcacgatcaaagctatcagctcgtttcaagtagttataataggctgctttaggcgcggtctgaatctttgtttcaccgtagtgaccagcattaagaaacttgacagctttataaaagcctttctggtctaaaaaggtggtggcgaattcaatcgcaccaccacctaaattctgggagttccatttccatagattcttttttgcatcaataactaaggagtcgtgatcgacaccgcgatagtaatcgcgggaatcctccttgagatcaatgccagcactacgcgcaatatcaactaaggacaatttacgggcacgatcaatttcagattgcgacaaacgctcacgtttaccgctattgaggtttgttgtttgttccggagcatcgttaagcgttgcttctgcagtctgtgcttgatcaaagtccaaattttgagcagcttgatcagacagctcgatcgtatgcacactggcctcattgatttctttgaggacttgtgccatcactttaggatctttcgcccaagtggccacatatcctaatgaatagtcaccagtgtcgatgccaatgttttgcatggcaatgtaagcaacagattcggcttgcgcttctttccaagcgcgtggtcgatcagcaaacgcctgaccaatgccatgtaactgactgtggccgtactcatgaaacagcgtcttgagtttcatagccgcatctgtttcttgtggactaatcacaatttcttgtgtggacggccgaaagaaaccacgaacccccggttcatcaataggggcttcactgaccttaacgtgaccttcggtattgatggcatcgacaacagcgtgatataaacgatccacgttttggtgatcacccaaccgctccttaataaaatctgttgcggatagtaaagctttgccgttggtttgacggcaagaatgtcaatggtccggacaaaaattgtccggttctgccgaatgcgtatggttgtcacttaaattcacgcattatcagatcttttatcagcgtttaatcttgtttaacgtgcaagagggactacaaacaagccctggcatctggtgctttccccagggctgtgcgcctattgaaaggttacttatgcagctgctgactttcttttgcaagcactgcgaccgttggtctcgcgatcatgattgtagaaggtgttgtaacgagcaatggattcagtgacgtctagaattgattcatagttgatctgctccagccggacccattctcgtttcaatagcgaatggtaggcttcgatccgcccgttatcagccggtttgcctttgcgcgaatatgagtgacgcaggtgcgcatctgtcaatgttgtctcaaataaacgactggtatattgactacccatatcgctatgcaccatcttaaaagtataaccttggtgaattaacgcttgaatcggtgcgaccgcgaggtcttgtgtcatctgttgacccacttgccaagctaagacttttctcgcttttggatcatacgctgttgcaaggtaaacccatttttggttgatcagttgaatataggtgatatcggtggtcacgacctcagacaagtcagctaggtgtcgcattaaattaggtttttgtggcatgtcagtggttgtggtaggctttttagagcgtttacgatacattgtcgattgaatccccaattcacgaatgactttccaaatcgtgcggtcacttaagcggcatttaagtaatttacgaatgcgtttagcaatccgcacgtatccgtaaaattttcgacgttgccaaagaacctgaaccagctctttaagcttaattcggcggcgatttcgtgacttaggatgccactttaaccagtcatagtaggtactcgaagggatccgtaacgctcggagaataactgtgatgcggtgcccccggctcaattgatcttgaatcataaaaagagcggcctttcggccgctatgaatcaacgctttgccagcaacaccgccgctcgttttaaaatatcgagttcttccctcaaacggcgattttctttttgaagttgcttgaactgttcgttggtcacagcagtaccttgatgatcaatggcaatgacagtggccgcctgaacccatttgcgaatagtgtctaaggaaggaccgtattcttcatgtagttctttgaatgagtgtcctttttcatgaagatcaatcaaggtttgcttaaattcgggggtgtagcgaatagctgtattggtcataaaatattcctcatctgtcaattatcgcacaaactatttttgtccgtaattacagcataggagccttaaaaggagctccctagttgtggacaggaagcttcttctgtatggcgcaatcttgctcaaaggtttttggacgaaattgacgaattaggcgttagtaacgtttataattggcgttccatgaagtactttggcaccgatagctgctttgtagtcgcccatgatgtaatcgacactgttggtcataatcatcaggactactgggttcttaccggcggccttgatctgatcgatatccattgtaccaacaagcgttccaggttctaccttttcgccttcagataccttgatatcgaatgggtcaccgtttaactcaacagtatccaggccaaggtgtagcatgatttctaggccactatctgtacgcatgcccagcgcatgcttggtaggaaagacattgataaccgtggcattgacaccagcgtagagtttattactgtctgggtttactgcgaagccttcaccgacgagtttcttagagaatacgtcatctgggacttcttcaatatccatgaaacctccgtctactggcgagaagagcgaagcacttgtcgtctttgactcaggtacggatgtctcaggcttctgagtctcaatcgaactgacagatgtagaagcgaggacgctaccgtcatcatccagcaatgcatccacttcttcgcgaacgttcgtgacatcggttccaacgataatctgaacagcattacctgcacgtacgacacctttggcacccacagccatgaagtcctgatcgattgcgacatcatctgggttgttaatcgtcagacgaagacgtgtgaagcaattgttgacggtatcgatgttgccggcaccaccgagcagctggatgtagctagctgcggcatctcgaaatggattatccttgacctttccattcttcttgccagctttcttagcctggtagtccttctttgtaaacatgtttatcatctcgtcgtccgtacgtcctggagtaggaaagttgaacttcagaatcaggaagtggaaaacgaagtagtagattgcgatgaaggcaatcccgacggtaaacattaggatataggtcggccagtggttcgcccacatagggataaagtttttggcggtcatctcgattagaccaccttgcatatcacctgtgatgccgagcgagaacattgttgtcgccaagattgcggcaagaatcgcgtgaacatagaacagaactggtgcaatgaagaggaaagtatagtcgaagggctcagtaatccctgcgaatacagacgtcaggacaccaggaacaatcagggcaagaactttcttgcggttttttggctttgcggtggtgtagaacgccaacgcgatacccggaacaccgaagatgttggagataccctgcattgcgaagccaccttcagggaacagagtggtcagtggttggttagatgcagcaaaagtggtaatgtgtttcatccagtagagcgtagtaccgccttcaacaacggcaggtccgtattggaacggtgcgtagataaagtgatgcaggcccactggtagcagagctttctccaagaagatatacatgaatgacccgagtcttcctgactttaccatgaagaattgcagttgatagacaccatgctggaaggtaggccaaatccagcaaaagatgaatgcaacgacaatcattatgaagaagccaatcattgcgacaaaggcggatccttggaatacccccagccagtctggcaactttacgtcgaagaacctgttgtgtagccagacaaccaatgctgcaattaagatggcgccaataacgccggtatcgagtgtcttaaccccagcaattactttcagaccacttgtttcggatgtcgatgctaggtcaacgctgaggcctttaccccagtgttggaggataacattaacgaagttgttgaaagtcatgtatagaacaaaagcctcgagcgccgcacgctccttagctttgttcgccaatcctagaggaagcccgataacgaagaggacttccatgttgttgaagacggtccaaccaccggcatcaacgatgctccagacgttggtccatgttgttcctggatctgcgatactgcccataatcactgggttcgtaaagacagatgtcaaaccaacgataatacccgagaaaacaaagaagacgaccggtgtgaacatagcgccaccgaagcgctgaaatttagccatcatggtactgtacctcgctttttagtggagttctggccagtaacccttgtttgcaataatcagatcatcaaggacttcctttgccttgtctgcagatggaacagtctgattcaatgtgaatgcttctaataccttttggtacgatccctcgaagtagccgtcaacgagcagtttttctgcggcattttgcgcttccatcaaccctttgtggaagtcgttgattgggtggcgcatggatattggttctgcacccaggcgaccaacataggtagggatttcaacaacggcatcttggcgcaggtttggaatggcacccatgtttggctgaatcagcatgaaccgttcgtggctgtcgttcagaatggaggttgccatatcaacgatgtattggccgtgttcaccaaaatcaaagtcgaggacttcaccttcagccttgttgcgaatcttcgtagccatttccttcgtgttcttcagacggccatccatgaccatattcgctcgagtatgatttgaatctgtttcttcaactacaatatctgggaagaagtagtattccaagtagttgtttggaaggtaatctgggaagtagtcaagaatcttgctcagcttgttccaagcatcttgccaactctgatcacctttgttgaatgatgcaatcttcattggagctttgcgcagcttttcaataagttcaggcataacgtcacgttgcagtgacttgtcataaatggatgtgtaccagccgaagtggttcaggccgtagtactgtgcaatccaattcttgcgatcatagccgaagttacgtgccatggtctcttcaatcgagatggtcatatcgcaagcgttcagcatatgagcgtttgggaactgacggcgaattgcttcggcaatcagtgtctctgggttggtgtagttcaagatccaagcgtcaggtgagtattcctgtacgtaaccgacaacaccaagcaagcctttgattgagcgaagaccgtaagagaacccgccaacaccacatgtctcttgtcccacgagtccgtgggataatggaattttctcgtctttttcccgcatctccattcccccgacgcgaatttgtgagaagacaaagtcgcagcctgtaaaggcctcttcggggtcaagcgtggcattcagttcaacattgtcgtatccgtcgttctccagcatatatttaacaattagtttcatgtcttcgttacgctcttcgtcaatgtcgtagagtgtaatcttggatactgggaaacggtcgctgttgtgaagcattgcctggacgatacctggtgtgtaggtgctacccccgccggcaattgcaacatgaagatctgtaaacttcataatctgtacctcctctaagctttttgctacaaatccagtatatgaccttcataatgattattagcgttttccattgaatccgtttacaattgcaattatagaatagtgtttcaaaataggaaaaccgtttcataatgaaagaaggccgatagatatgcgttttgaggatttaattaacaagaaggcgagtagactaagcgagaacgacacgcagctcctttcgtacctgataacccatagagacagcgttatggatatgacttcacgcgaaattagcaacgccgcttttacatctccggcgacattaacccgcgtttcacagaaactcggttttaatggcttttcggaattgagatactttctaaagcacgagggagacggtgaggcgccagccgagacgggctatatgacgagcctggtgaacgatatgaccgatacgatatctcttcttgaacagacgaacctaacgccactagttaaggcgatacacaacgctaagcgggtctatctttatggaactgactggggggaaaagcgcgcctgcgagctccttgcgcggaacttcttagcatgccgcctgcacatgtatacggtaccttcaatcactgaattcaagtgggccctgaatgatgtcggtccagaggatctcatcatcgtcatctccttctcgggcgaaaatgacgagctgattaagagtcttcttaagctggagctacataaaacgccgttcatctcaatcacgcctttgtcgaagaacagcctgtcttctcgtgctactttcaatctgtactacgtcagtacgcagctgagaatctctgctgttgaggatacagagtacaactacttctccaccctggagtatgtctccgatgcgctatttcgttattttttggatatatataagatgtaagtttcgatttgaaagcatatagaaaccagtttcatataaacattgttattaaatgtaaggctttggcgtgacccacagaagtttcatcttttgtgtataattgaacttaaaaggacgtgagaagatgcatccattaacacacaagcttaggaaggttaccagtttcaacattaacaagctatataagtacaacttcttggtacttttactgactgcgatagggtactttgcttatgtcgggttgacctctctgatgcagggcaaaccgctcactgatattctgcacgatagcccctatacatcggtcatgctgatggtggtcttcttgaacatcctagttggctactggttctggctaaataaggattatgcgctgcgcaatactggaacggtcaggctaatctttatcacgctgacaatctgtcagttggccctcggtaatctgcttgtggttatgaccagcggtctgaccttcttcaacgcgattcaacaggttccagatgggaaggcagaacgatctctgacgtcatacgcaatcgttggtgtggcagcttcctacgtaatatgcgttggactgattctgttggttctttctagaagctagtatgtttgcctgtaagatgtatatatgacgagggcaaaacagataacttgtcgagatctcttgtgggtctgataatggactgtgcatcccgatgtcaggcgggaataccggctcctatgctgtcattacgcacaaactatttttgtacagcataggagccaaaattgtacggttggacgtgcggacaaattcctggacttcgagtaaggtaggactatgtattcaaaaaaagataaaaagcgagccatagagctctactatcagtaagaacattcatggagtgccgtcgttcgcaaattgggctatccatctcttggtgcgctcaagagatggataaaggagtatgagaaagatcctaaggtcgcattggcggtcggacctaaatctcgccagccaaagtattcccgagaacagcagaaggcggctgttgattactactttaaccacggtcaattcatcaagaagacggtcaaggcactaggttatcccggcagaggtctgcttagaacctgtctagtatcttttaagaactatcttcaggaaggccaatacaaccatttgaagactgctgttaagggcacgttcacagtttttccaaagtcgccgacatttgtctagccaactccatgaacgttcaatgatccatcgttgcggtaacaccgtgaacgtatgcaactcgttgcgtttagctaccgtcgtcttagcattcaaaatgagcttcacctgatccgcaaagtcattgccagtgtagccaccatcaaccatgacatgctgaaccagctctaaattttggctagccaaactaaacatagccaatgcacctgaacgatctgatacattagctcgtgtcacgagaatggcttgtggtaaaccattaatatcaaccgccatatgacgcttaatccctgaaatctttttgccgccatcgtagccactatttttcgttaaatcagtggttttaacactttgagcatcaacaatcacaaacgacgttcgggccgatcggccctgtgcaaagcgataggaagcaacagtttttttaaaagcctttctaatagcgaatcagctgtcgggtctggtttatctcgccacatatcgtaatagcggtagacagtgtgccattccgggaaatcgtgcggtaattcacgccattgacaccctgtagtaagcgagtaaaggatggcattgaatacgtcataaagatcataacgacgcggtcttgtatgcttacggaagttttctaaatcaggttgtattaacgcaaattgcgctcgagaaatattgcttggataatctggcatgacaaactcctcagtcggttttccacaattctaccagattcagcagatactagacaggttcttagacgtaaatggttgagaattttttgctttaactcatcgctcagcttagttttccgaccacatcgtgatcgcttgtattcggcatctgtttgtgctaattcagcctgataaggttgacatcgagataattcataagaaattgttgacggtgatcggttcagccgaacgcccatttggatattggacagccctagttcacaaaaggtttcgattttaattcgttcggaataggttatactagacaaaagatcagctcctaaaagatgggtttgtggtaaacaccattttaaaggaagctgatcttttttgtccgaacagcgttcggattaattttacaatctaccaaatgacaaatgttatcaaaaagttgactttttcctaccgattatgtgcaattaaatcatgtaactgtttaaaatcagggataagatcataagcgtgagttttggcttccatgaccgcgtttatttgttgtttaatcctttcggtatcttcctcatcggtataactaacccagttgatatactctagccaatcaaagtaagcgtgcttacctttcccataactgtttcccattagtaaacaaggtgttccagttaaaactgagaataccattgcgtgccatcgatcagtaataattaacttttgacctgaaaataggcttaattcttttccgaataatttttcacgggtattaggtgtaatagttttaaccgtatctaaaacagtatccgtaaattcaataggttggtaggctctcagcaaagccttcatgttttggataaccttatctttgacgactttttcagcgtcccgtctgagaacaaatagtgacccttgacgcttcaattttgggaatttcttagattgcatatataaaaccatatcaggtgtaaaaatgactttattgttgaaagtagtctgcattctatggtaactctgtgcatctcgagctactagaactaaattgggatttttttggtaagcctcttgacttaacttttgttcataaagtccagcttcattgtcttcaaaatgaatagactgtgggaatgagatggttaggttatcagtaaaagttgaaaatacttttcggcgtgctcgctcgtgattaagataaagatttcccatgtttccaccaccagtaaaggcaacaatatcttgtttagttatacattgcttaacaactggaatagccgcatcatcatcttcctctactatttcaatatattggtaatctggaaactcagcttcaatatattttcgttcggctaatgatattgcctggtcaccaagattggtgtagctaggaacaccaaacataaaaaatttgggctgattgtttttaggcaattcgtgtacaacgttattaggattgatataaaagttggccatattattttcctcattttaattttatttgctggaactttcctgataggatttttccattttctcttgattaataacagtcaaggaaagaaagaaactgcacccatttgttatggcaaatacaaaaaaaacagtggctgttcctaaagcattaattagcaatgggtaaactaagctaattgaaaaattagtgatccatgtggtcgctgtagcgattgacataaatctagctttgacactattaggaaacatttctgccatgatcaaccaagtaacagggctaacgataccttgatggttcgctaaaaataggacaagcattgttagaaccaaagtatttgtaactacctgtggcaacatgcttgcgtgcataatcacccccaatagtgctaaaaagatagcattacccgttaacccaatttttaacattttcaggtggttatgattggcaatcattctgcttccaaagatacaagcgaggacagatgccagaccaattaatatatttgcatacaaagagccacgttctcccataccgatcttttctaacaagatagtgccataatacataactgtattaacaccggatacttgctgaatcaaggcaataatgattccgattaagagtaagtagtggctgcttaaaaattctataattcaggcagttaagctaatatatgcattattgcggtataataaatccattggaattagctgttttcctgcattttccttgcattttttgggaacctactcggaggttatcgtatggtctatcgtcacagcccgcttcaattgtcatttgaatcctttggtgccggtttaagtaccccacttagctctaacaatgagtgggtccagttggcggaggtcatgccctggaaagctctcgatgaggcataccaattggagttcaccaaaaatgcgggacgtgcggcaaaaccatttcgtttactctatggggcaatcctgatccaacaacggatgggtttaactgatcgtggggtggttgcggcaattcgtgatacacccgcacttcaatatttcatcgggttgtccgaatacaaagcggttgagccgttcaattattccagcctggcacactttcgcaaacgaattgccgatatctccgagctgattacgaatatcatgaatgatacagtacgcgccaagatcgaagcgttggtcccattcaaagtggacaccgtcatcacggacgcaaccgcagtgccagtcaaaatcaagtatcctcaagacaccgtcctcctcaaccaagcaaggctgaatcttgaggcgatggcgatcgatatggcacaccaacttggtgtgccaaacccacgcatgtacaaacgcgaggcgaagcattgttggacctcattttcacgacatccaaagcaacagcgtggtggctttcataaacaggtcaaggcccaacttcaatatgtgcgccgtgatttgcggtacatcaacgaattcatcgatcagggtgcgactctaccagatgaacaagcgattcgcttaggcgtgattcgaattctatttgaccagcaatggtacatgtatacccacaagactcaccacgttgaagaccgaattgttagtctccaacagccgtacattcgcccaattcaacgtggtaaggccaatgctaaagttgaatttggggcgaagattgactgttcgttaagtgaaggcgtagtcgacattgaacgttttgatttcaccgcattctctgagggccaagacttcgcggaaactttagaccactattacgaccttcatggacattatccggatgaagtactggccgatacgctgtaccgtaatcgggagaacctaaagctgtgtaaggatttgggtatccgaatctgcggtccgaagcttggccggcatccaaaacacgttgatgcagcgaaacggcgtgaggatactgatgccgagaatcgaagaggtaccattgaacgccggtttgcttttatgaagggcacgctggggcttgacttggtgaacactcggacagctgaatcactggccgtcaagattgacgcggccatcgtcttgagcaatgtgctgaccctgttaagggtatttgctataccaattttaattttggctaaattcgagggtgaggcctatcaaattcgctataaatttactacaagggtcgaagatatggtggcctagttcaacagccactaattaaaacaacataccaattaaggtcatatcatcccatatcaaaagagatactgcaaatcactctgcgcacttggataagcatagatcttgtttaaatcactcggcttttcaccagcatcaatggccgctgcgaaggtattgatcaagtcctcagccaagctggctaagacgacagcaccggcaagtcggccggtctttttgtcgacaatagtccaaacttgtgcgtcaggatcctgaattcgattataggtgtaccagtgggttgtctcgttgtgtttgacggtgtactgatcaggcgctgcttcagcggcctctaatgaaaccccgactttggctaactccgttgggccaaagacgatagtcggaatggccgaatagctaatgggtgcttggtcgcctaaaatttggttggcaacataacggccttcgaagccggctaccggtgttaatttaggctgtggcttcaaattgacatcgccgattgcataaatcgtctcaactgcggtgcgaagatggtcgtcaaccgaaataccacgcgtatcagccttaataccagcattggctagcccgaggtcggcaacattggcgatacgacccatggcagtgattgccatgtcaacattcaaatcgaagttatcagcatgtagatgggtcatggtacctaagggcgtgattttagtcagttcgacgttaggatgaaaatgaatcccagtcttggcaagcaatggttttaaagcttcggtagcaactttggggaatgcccgtaacaaccgatcagaatgaccgatgatatgcacatctgcgccagccgctgcagcgatgttggccagttcgacactgacataaccggctccgatgaaggcaatgctggttggtaactgatcaaggtccagaaaatcccgactcgttttaagcagattggccccaggaatgtccggataacgaggcgtatgcccagttgcaatcacaatatgttcaccggtcacgttttgggagccaactttgacagcatgttcacctaaaagctgagcatgaccatacaacgtcgtgatcccagcatgagtcaggccattcaatgtgccagcaggtacgccggttgtgtaactgcgcttgaaggccattaaggatggccagtcaatcttcgccgtcccgctgatcccaaaaccattcatgcgcaaggcagcatttttaacttcgacaccgcgatacagcattttttttggatcgcagccatagttgggacaggtgccgccccacaaatcgttttcaacgactaatactttttgctttgctgctaaaccgtaagctgctgctaagccgcctgggccgccaccaatcacaatcgttccataatcataagccatcacgatcactccttcgtctctgtgttctgatcgacaaatgcacttgcgagataagcgacaacactatgggtattgaccacaaacgcaccatgttcactattcacgcgcaacgcctcatgcgcatctaaaagcggcaacgcctcggccagcgtcaagttgccgccaaccgcatgccgggccgacacatccgctgcaaatggtgctaactgactgagcgtgacctgcagaccctgattggcttgcgctcccttgaacaaatccgccacgaaatcgttagccggattggtcgcaatttcttccggcgtattaacctgcaagagtttgccaccacgcatcacgccgatccgatcaccaagtttcatcgcttcagccatatcgtgggtcacaaaaatgacagtggtcttcaaggcacgatgcaaatgcagcagcatatcctgaagctgagtgcgggaaatcggatctaatgctgagaacggttcgtccatcaagaccaccttaggccgtgatgctaaggcccgcaaaataccgatgcgttgctgctgcccgccggataattcgcttggcatgcgattgcgatactcggctggcggcaaatcaactgttgtgagtaactcgtctgttgccgtccgaattttttggcgcgaccagcccttcatttcggggatcacggcaatgttttgcgccaccgtcatggttggaaacaaggcgatttgctgcaggacataccccagatcccaccgcaagtcgcgcattttgtaactggtgagcggtttgtcggcaaattcgatgacgccgctcgttggatcaaccaaacgattgatcattttcagcgtcgtggttttgccgctgccggaggtgccgactagcacaaataactccccttgatcgaccttcaggctaagatcgttgaccacgggcttgccgtcatattcctttgtgacgtgttcaagactgatcaatgccatcagcgcacctccttcagcaagccatgctgaaccaaatagcggtgagccacagttgcggccttttcgttcttcacactcacggcataattcatggtctgcatctgtttttccgtaatttgaccagccaacttgttcaatgcagctacaagttgcgggtgtttttcggcaaaggccgttcgcatcaatggcgcaccgcgataaatcggaaacaaccccttatcatcttgcaacgccaccagatgatattgccgcaattgcgcatcagtcgtatacccatcggtcaaattgatctgcccgcgatctaaagcttggtaacgcaaggaagcatccattgaatccaccttaaactgcaagccgtattttgattggatgcccttatacccatcttgccggtcaatgaactctaaatcaaatccggcgcgaatggatggtgcaattttgccaagatcgctaatggtatgcagatcataacgcttggcaaaactttccttaacgactaaagcataggtattgttatacgccatcggtttgagatagctcaggccttgtttagcaagcagtttctttgcaagtggataattatctttaccagccgtcacctgttgttgctgagcggcagatggtttcgtcaaacttgccagaaccgtcccggaaaactcagggtatatgccgatcttatcggttctcaacgcattgtacaagaagctcgtctgtccaaagttcgatttcaacgtgaccccgacatcaggatcagctttttgaatgagttctttgtacatattgatcaaaatatccggttcactgcctagttttcccgcaatcgtgatagtttcctttggtgcggtcacataagtgtatacttggctgccaaccataccaaagatggcaaccgccacaaccccgacgctgaccttccaactcactttttgcatgacatttaagagccacgaaaagacaatcgccaatagcgctgctgccaaagcacccattaaagttaacgccgcatcatttcgatcaatacctagcaaaatgaacgtgcctaagccaccggcgccgatcaaagctgccagcgtcgcggtaccaataatcatgaccattgccgtccggacacccgacaagataaccggtaaggcgatgggcaattcaactttgaacaacttccgcaatcgactcatgccaaacgcatcggctgcttcttcataggaaggatcaatatcgcgtaaaccgatatatgtattttgaaaaatcggcaataaagcatacaccactaaagcaataatcgctggcagtgtcccgatacccacaaacggaatcaacaaccctaacaaggccaacgaaggaatggtttgcaaaacaccagtcacttgcagcagcactgccgcggttttgtgatgcgtctggacccaaacggccaatggaatcgcaatcacaacggcgatcatcaaggcaattaaagatatttcgatatgttgccccaaggcactaagcaactcgccgtgccgttcagaaattgtccgccacaaatcagccatgttatgcctccaattgaatgtgatatgagtaagtgtaacacctagttttcacgtgcaacaagataagaacctgtctagtatctgctgaatctggtagaattgtggaaaaccgactgaggagtttgtcatgccagattatccaagcaatatttctcgagcgcaatttgcgttaatacaacctgatttagaaaacttccgcaagcatacaagaccgcgtcgttatgatctttatgacgtattcaatgccatcctttactcgcttactacagggtgtcaatggcgtgaattaccgcaagatttcccggaatggcacactgtctaccgctattacgatatgtggcgagataaaccagacccgacagctgattcgctattagaaaggcttttaaaaaaactgttgcttcctatcgttttgcacagggccgatcggcccgaacgtcgtttgtgattgttgatgctcaaagtgttaaaaccactgatttaacgaaaaatagtggctacgatggcggcaaaaagatttcagggattaagcgtcatatggcggttgatattaatggtttaccacaagccattctcgtgacacgagctaatgtatcagatcgttcaggtgcattggctatgtttagtttggctagccaaaatttagagctggttcagcatgtcatggttgatgatggctacactggcaatgactttgcggatcaggtgaagctcattttgaacgctaagacgacggtagctaaacgcaacgagttgcatatgttcacggtgttaccgaaacgatggatcgttgaacgttcatggagttggctagataaatgtcggcgactttggaaaaactgtgaacgtgcccttaacagcagtcttcaaatggttgtattggccttcctgcagatagttcttaaaagatactagacaggttctaacactgccccaacaacgattccgatgacaattttcagaatcagcgacacatctttgtaccgtttatacatcttggcccctcctccataaaaaattagcgttcaatgagaacactttttagcgtgccctaattctgcggtgactgcaagttatttttatcgaaatcggcacaattttttgtggcgtttctccgatcatgatcgtccctgcttttttgccaagcaaaaacaccgatgcccaacgacatcggtgtttactactagacttctagactttgattctttgccaaaatgacacgattgtcatttcgaaccacttttcagtgaagccttaacgcattattcaactgtcttacctaagcgcttcttcttaggtgctgccttagccgcattggcatcggcatctttataaccgaagaagtaaaccaagagaaaggcggcaaccaaggtcacaaccgaagcaatccagaatccggcaaagttgcctggattgtgtgcccaacccggagcagcaaatgatggaaaaccgatgaagctgccagtgaatccgtacatcgaaacacctaacaggccattgacaacgccaccgattgcggcaccgatactagcaaagacaaagacccggccatacttcaagttaacaccatacatcgcaggttcggtgatgccgcagcatgcgctgatgaacgcggaaatagacaaacctttcagtgctgggttgtgcttagtcttaacccagacagccaacgcgccggcaccttgggcaatcatggaaatggagacgatgccgttaagcacggactctgggtgtgccgaagacaattgtgcggtaataatcgggataaccgcccagtgcaatccgaagataaccagaacctgatacagaccggcaataatggcatcggaaatcattggcgtcaagctgagcaatgcctgaatcccggatgtgatcgcaccagacagcaccgtgatcagtggcccgacaaccaagacaaccgtcatgccgactaagaagatttcaaccagcggcgtgaaaatcatccgcagaaccagtggcatccagctcttgatccacggttcaagcttggctgccatccatgccgcaaaaatcatcgggaaaatcgaatacgtgtaattcgcaatgtggacaggtaagccgaagaaactggcattgacccccatgcccagtaacgtaccactaactttaccagccgttgcaatcttagcaattgatggataaatcaggaacgcaccgataatgccaacgataaccggatccgagccaagtttttgcgcggccgtgaaaccaacgatcacaggtaggaagtaaaaagctgcatcgcccatcgcattaataatcacgtatgtcggatccgtcgttgaaagatggaaccaggtggtcataatgttgagaacacctttgagcatcccactggcggccaacagtccgataaccggaatcatggatccggttatcgtcccgatcaacgcctgggtccaacgtttgattgtgccccagaagctggtatctttagcctctgcttgggtttctttaatggcttccgcagtaccttcagcattagagtagccggggcctaattgtttaatgacttcatcataaacgtcagtgacggcttgcccaatgaccacctgatactgaccatttgcccgggcaacatcaatgacgcccggaatgttgcgcactgtgtcatcgtccggcttttgttcatctttcagataaaaccgcaaccgggtgatacagtgaattaaactattgacgttctgcgccccgccgacatcggcaataatctggcgggcagtcgccgcatatttgctttctttcttattcggcgtcgccacggctgttgatgtagccgcagctgccttaggtgtcatcacggcaacttcttcaccaaccttaacttcgcccggggtgacatcaagatgatcaaccacatcattggtattggtaatcgcaacaatgaccgtggtctttttgccggctttcttgatcgcatccaaatccatggaaccaatcacgtcgccggctttgactttggcatccatcgcggtgtcgatttcaaacggtgcgcctttcaattcaaccgtatcaatacccaagtggatcaacaactcggccccatcatcggctttgatcccgattgcatgcttggtatcggcaatcatcatgatgcgtccgtcaaccggcgcagcaatctgactatctgatggttcaatgccaaagccatcacccatcattttctgtgaaaagaccggatcggagacgtctgtaatcgccatggcaagccctgaaacaggcgccaaaatgtgtagcttcttttcatcagccatttttggttcctccttaattttcttccgatgtcaacaatgcaatcgtcgcgtacggcggcaatgtcatcgttgcagttggtattaatcctgattcgttggtaataagcacttttgcggattggaatcgatttggcagcggtactgtgatcgccttgtcactgaagttattcaggaccaacaaatgatcctcaccagcaacccgttcgtacgcatacaagcggtcaatatcgattccaaacggttcataactgccgtcactgatcacgtcatattgttttcgcaacgcaatcaacttttgataaaattggaaaatttcgccatgcgctaactcatctttgacgttgatttctttttgattcgtcggtcgcagccaaggtataccggtggtaaagccggcattagccgaatcatcccactgcatcggcgtccgactgttgtcacgggccttcgccaaaatgatggcaaacgccgctttttccgacttaccttccttgagcaaagccttgtaagcattcttggcttcgatatccacataatcagccattgaatggtagtgcggatcggtcatgccgatttcctcacccatatagatatacggggtgccacgactgaggtgaatcgccgcagcaagcatttcggcacttttaacccgatacttgtcaacgttgccaaaacgattgagtgcccgcggctgatcgtggttattccagaacagcgcctgccagccgccgccttgatctaactgttgaccccaagtgtgcaaaatgtcccgcaacgcattgaagttatacggttctttcgtccacttttcaccgttcttataatccgtcttcaaatggtgaaattgaaagaccatggataattcatgattttccggtttcgtgtaggcgattgagttcttaacagttgtggaactcatttcgcccaccgtgacactgttttgatcctggccgaagctattagccgccagttccttcagatagtcctgaacaatcggcgtatccgtgtacagcgttttgctggcaacccctggcggtgcatcgaccagtttttcagccttgccaatcacattcaacacatcgaaccgaaatccgtggacacccttggcacgccaaaagttaataatcgctgcggcttcttgccgaactgctggattgtgccaatccaaatcagcttggtggcgttcatataaatgcagataataattgccggtgtcgccaaacggtgcccacgctggtccgccgaatttgctttcccagttagtcggcaagctgccatccggctttggcgggcgaatataataataggcttgataatgcttgtcgccagccaacgccttctggaaccattcatgttccgtgctggtatgattcaacaccatgtccaacatgatatcgatcccagcttctttgagtttcttagccaattcgtcaaaatccgccatcgtgccgaaacgcggatcaatattgcgataatcggcaacatcatagccgttatcgtattgcggtgacacgaaaaatggattgaaccagatcatgtcgacatgcaatgacttaagataatcaatcttttcaataatgccacgcaagtcaccgaccccgtcgccattgctgtcataaaatgacttgggatacagctgataaatgacttttttatgaaatcccatcgcgcacctccttaatctcaaccattaattgcaggctgagtttgctaccattcacggccgcatccgccgagcaaaatcatgaaacttaaaccgatccgctcggtgccgcgactccgtgtactgaaactttgttgtatcgatcagactgctgcaactgcgaactacgacgaccactgcggcctggggcaacttcaggtaacgccgatcttcttcggtagctgtttccaccgtgatttccttggtcgcataggcaatggtcaaccccacctgaccttcgagataggcatacaacgaatctttggctgccgactccggaatcggcggcaccaccttaggatcaaggtaatcgatatcgatgatgtccggctcacctttcaaataccgcacccgcttcaaaaaccgcatctgcttcgtcgtgacgtgcggatccacatccttaaacgaattggctggtaatgttgcaaaatgattggccaaaatgacggttcgcgtctgtaagtgaaattgtttggccagttcggcataacttacaactcctgaaacggggaaaacgtattcctgccgattaatcaccgttgaacctttacctttttgcgactggataaacccgtcgtctttgagcagctgcaatgcttttcgtaccgtgtcgcgcgatgcccggtacatttcctgcaacgtccgttcacttggtagcaacgatcgcgttacataaatctctgcttcgatcttgtccttcagatcctgataaatgacatcgtacttactcatttcttccccctccagaaagcgatttcacttacagagcttattttacctgtacgtacaggtttgtcaacaaaagacgcttggatttggtcaataatatgtgtcacaaactcaaaatgttgtcatatcagcattttgggacattaagaaaacctcagggaaacccgccctgaggtctttttagttagtggccactgccacttacttgtcttcgagtctaaattcatagccaagttcgtttcggtaatacaccggtgacatggcaccaccacaatcttcacacacaaattgaggcggttgatcaggactatacgctaagtcacttccatcaagcatgatcacaatctctcgtggtatttcctcatgcttgtggcatttctgacagataaattcgacgttgtcgttcccaactgaagcggcatcggtcatatgctgctgcttctgcttgcttgtatttggtttgataggcttctttcgcaatgttttgatttacctccaacatgtagtggcgtgcttgtcgatctttcgcatattgtaccttgaggcgcccatttttggccacactcgtccccatgaactcgaaaaactcaccacaatcggaacatttcaagggatcacaaccaaatacttcgactgttttttctgtccatgacttaaccctcataacctgtttcagttcgaccaagcgccgcctaacggctttttgatacactgccataacttgtttcattaaggtcttgatgcgtcgactgtaaatgccgtaacggcgaatcgttttaaaatgtcgatcgggaatatgccgagtcaacaccccaatgaaggcttctactgacattaaatgcgtctctttgcgattggttcgtttatctttgtacgaaaagagcacagattcgccgtcgtacatgacaattcgatccatggcgatgggaccccgcttcatgtaacggctgatgtattttagtaaccctttgaggtgtgtacgacttcgctttggggcattcacgtaaaagccttccgcattggctttgtaggctcgttgtaagcgtggttgaactcttttcttatcccatggcgagagtgtccggcgaattagcttaagcactgcattttgccagtaaactcttaggcgcttatacggaagataatcataggtcttccactgtccatccggggtaatcccgcccatcgtgaccaccatatgcacatgcggattaaattctagttttgatccaaaggtatgcagggcggccaccacaccgccctgtaccttcctattctttcccaacgcttccaaaactactcgcgccgcttcatccatcaaacccttgagtagcaccgatcgatatttgtccatgagaaagatctcgcgtaagccttcatcaatcgtaaagatcacatgtcgatgattaacggcaaacatatcatgtgcaaccaaatcgctccatcgctggctttcgcccacagcacaagtcgggcaaaacttgcctttgcattttaacgcaatgagtttggtgctatgacagccttcacaaacaaataagcgatagcctttccgaatatcaccacaagattcaaatttggcaacttcttttttgaccaccggccgaattcttcgtccatgattcttcaagaatttagcccagttctgatgtttgtcgaaaaagatcgtctgaagaatattctttttcataccaaaattttaccgaagttttgacgggatcaaaagtaattgaacccttgagtaccaaggattcatgaaccccaaaattttataatcccttatacgttcaaatatccgccggcggccaacaacaagacaccgagaatgccgccaacctatttcaaaattcgtttcaccgtcgttcctcccaaaatagttgttttgcttattatagcagttgtcttttcctctgagaccagtactatgaggatagacttttttataaaaaggggatcgccatgtcgactgaaactgacagcattttagctgctttcgaaaaattcaacaccattattatccatcgtcatattaatcctgaccctgatgcgattggctcacaaaccggattggccttgctgctgcgtgcagcttatcctgccaaaaccatctacacagcgggaccggccgcccccgatttagcttggatcggaccacaacaacaagtgtccgctgaagcttacactggtgcgctcgtcgttgtgattgatacttctaatcgcgaacgcattgccggtgattattttgatcaaggatcgatgctgatcaaaattgaccatcatctggatgaagatcagcttggcaccatcaactgggttgacacccatgcttccagtgcatcagagatggtgtgggacttagtacgtcacagcccacagctgcaactcaccaaagcagccgctacagcactctacgcaggcattattggtgacactggccgttttctgtatgatttaacaaccgcccgcacccaccaagctgctgctgacctacttgcaaccggcatcgatgccgccgcaattggccgtcaagaagaccagttcccggaaaatgttggccacttgattggttgggccttagaaaatgtcaaaatcactgacactggcgccggatcactcctcatcacaaaggccctgctcacccaatttggccttgcgtatggcgaagaacagcgcgcagtcggcaatatcggcaagctagccagcattgatcgctgggtggtcttcaccgaacgaactgatggcagctatcgggttgaactccgcggcaaaaccaaagaaatcaatacgctggccgttcaacacggtggtggcggccatccgctggcaagcggcgccgtggcagataatgctgctgaacttcatgctattgaagaggaacttgcatcgttataaggtgtcatgaagaatggtaatggctcagacgaatgatctaaaccgcaaagccagagcgatgcctcatttctaatgaatagctgttgtgataacgactggtagacttggttttcaaaaaatacggtaaaatattagaatcgaggaaaagttgacacgtactagtgtgttttctaccttgtcagtcaacaaatccatgatataatgactttggtttagaaaaacttttacggtcacatcacaatagccgtttcccctgtacgggaaacggctatttttttcacccgctgcgataaatcgtggacgacgggcgtgtgggttgaaggcaactgcaaagactatcgccgatcattcaacctatgttcgagcagcaggagtaccactcccacaatgagcggggcgataatctgatttagaaaatcaatcacggtcacaccccctcccagggcagttgccatgtttgattatagcaaaggttgtggggcagacatagataaagagaaactataacgaacgttttttatccatttaatttaaaagcgttgctaatattttcctattcctatctaattttatccctattaattcttttttgctaaaacaataaatcggtcttcaaacgttgtcacgctaccttggctatcgatgatcttctgaagttgatgcagctgcggcattactttttttacatcaaaatccggaaactcccatggaataaccgtggcataataaacaattgcgccaacatcagtgaaattcattttcacaaaggccgcgtctgatttcagaatctcgaagcccgcttcccgcaactcggtcataacttgcggtaaattattatctggaaaagctggtgcatagttggcattcaaaaaccgtgacagactgtaattattagttgcgccgacttgttgtgagataaagagaccatgcggccgcaacacacgggcaatgtcgcgtatcggcaaaccgccgtgactgttggtgacaatgtcaaaatgctcatcaggaacctgcgccaatcgttcttctggatccggatatagcgtaacgccttgcggtaccaacgtgcgttttaacagatcaatattaggttgccaaccttctgtgacggttgttttttcgacaggatgctgaaaagtctgcattaattcaccaccgcctgtgtccatatcgagccactcatcacttggcttcaaatgtcgacgaacccaggccgaataattccacggcagttcttcggtttggcaacgtccctttaaatggctaaagtcccagccacgcatggcctgttgactttcagcaagccactctgattcgattgtctgcattgtgtcatccctcttcatcacgtcgttacaccagcgttttcatgaggtcagtttaccactatacccaaccatcttcgccttaatcgccgctcgtcactttaattccaatgatcccaatcacaagcagtgcgatgaagaaccaagtcgctggttgcagttgatctttaaacaagaccacaccaacaataatcgatccgacagcgccgatcccggtccaaaccgggtatgccaagcttaatggcagatgtttaacggcaagggccaagaaccaaaagcttaaaaccatcccggccaaagtcgctaacgtaaatcccaaacgactaaagccatgcgacattttcataaaggttgcccaaacgacttcaaatccacctgctaaaactaaatagaaccactgcatgaatgtgtcctcctcgtatcattttgcagcctcaaaacaaaaaggcgacagtatacgcaaccgctgcattgacctaatgcggttgcgatactgtcacccggtagtgactgctatttaaataaatgttgatgttattttttcacatattgacaacggcgtcaaggaaattgctaaaagttccgcgcaatgacccacaaaatgatgagttgcgcaaatgcgaacgaccaagtaaaagccagcgcccatttgctatgttcaacaaccatgagatgcccggcaagattgccaatcaccaccaatgccattacaagccacaacaacgctcttgtacgatggtcgattggtccctttgaagtgcgcatgatccagaaaataatcattgatgtgattgaaacacccaaaagaaccccgataatgtgtaccataacgctaccccatttcgagcgcataccttagttattttgcaaaacattctatccgtacttcttaaccatatcatgtctccacttgatccaaggcaccattttaaacagctttgccaatcagcagctctgtccatcccagcacaaaacccgctctaatcgcaacattcattgattgcacatgggagaattgggtcccataaagtggcaagacatcttggcgtcgaagctggatttcagcggttagttgctgtactaaccggctggcaatgccttggtgacggaaggcagggtcaagcagctcaacgccgatctcccaacagtacctgccattttgactggcgcctgctacggccacgaggtctccgtctagttcgtagccaatcccaaggcgatccggtgccgccggatcataaccaaacgccattttgatcgcatgattggcttggtatttcggaatcgcatccgcttcaatcaaatgcatgcccgcggttaattggcgacttagctggttactcggcacgaagaaaggtgccatattggtcacttttaacccaaaattccgaagcaattcggtgagttgctctacggttttcatttcaaggaaccacgccccgtctgcctgtccaaaagcatctgttaaggcaactgtgacctctggcttcgttgtgcgcacccatagtcgtcctttgcgaatgacaatgtcaccaacatcacgcgcccaactgcgggcagtcggcacaggcggtctagtcacgaaaagatttcctgtattttgcagtcgcgatgctggcacttgcaaatccagtgctaattgtttcgtgataagtgacatctcatcctccagatttaaaatgttgggcgttacttttcaagggtcttgcttaaccatgacacgttcgcgaatcgtcccaaacttggtcgtatcttccataatctgatctgtcacgctaaagccaaaatgctgatagaatttctgcgcagatacattattatccaaaacacgaatataaaactggtcaaatttctcatgcaggcgttgtaatgcccgcgtcatcatgacagcaccgacacctgtatgttgaaactgcggcagcacataaattgaataaagctcaccccagccgttaaaatccggcaaccgcgctggaccaaagctgcaaacaccaacaattttatctttgtcatcaactgctaacagcgtgtcttgccagcgccgttccgggtgccaactggccggtgagagttgcgccaaaaagtcatctgatatgagtccgtggtatgcgtcctgccacgtcacgtagtaaacctgccgaatagcatcaaaatcagagttagctgtggcttcaataaccttcactttagcagtcattctcttcgcctcatttaccgttaccttgctgagccaatatccatgtcgcagcatccgccaaactggcacattcaacaaacgaacccgccacctcttgataacctgcatctccacgccctgttgcgacatgaatccccaagatgccagcattaatggcacattgcatatcagccagataactatcaccaacgatcacagcatcacgattcgcaaaacgatagcgaagatgtgcttgtgcaatcagaccggtcttaggttttcgacacggacatccagcgttctcagcatgtggacaaataaaggcatcagaacatcccatttcaagtaacgagatgcgcagcgcggcttcgtccaactgaccagcagcaatttttgtctgattcgtcagcgcaaaaacttgcaacccagccattcgcaaagatcggatggccgccacactgccgggataaggttcgaattgatgaatcgccgtaaaatgaccgtccccgcctatggtgccatcgcgatcaatgaaaactgtcttgatgaccaagtgtgaggctcctttcagtcgtatcaaacaactaatcccattgaattgctttcattatatgtcagtgatgcgtttccaaccatccgaacatttccgtagatcaatatcatccccacatggttcatggcgtgtttttttaagcgacaccttgataattgactttaaaatgcaagtgctctatattccttgttattggttcaaaaaaataaaccattagtcgaggaatatatcatgaccaaagccatgcaggccgcgcttatcacgcattataaacaggctgtgcctgaaattcaaaatgtccctttacccactgtgcgaccaaatgatgttttggtgcgcattgtggcagcaagcattaatccaattgatctcaaaacgaaagacggcaagctgcgactactattaaaataccagatgccattgattcttggcagcgatttttcaggtatcgtcacaaaagtcggaaccaacgtgactcgttttaaagtcggcgatgccgtttttggccgaccacaaaaagaccggatcggaacatttgcagattttcttgcgattgatcaacacgatattgctttgaaacccagtcggctgacatttgaagaagctgccgccttaccccttgtcagtctcaccagttatcaagcgctacacgacttgatgcacttgacaccaggtcaaaaaattctgattcaagccggggccggtggtgtcggtaccgtcgcgattcaaattgccaaagcccttggtgcagaggtcgccaccaccacaagtagtcagaatatcgcttttgttaaatcactaggcgccgatcacgtcattgattatcaccgtgtgccatttcaggatgttctgtcggactatgacggcgtttttgccacactcggcgacaccaatcttgcgaatgcgttccaaatcgtcaaacccggcggcatgattgtcagcgtctccggcatccctgatgaaaagtttagcgatgcttataacgtccctatttggaaaaaagtagcctttcgcttggcgaatcgccgtatcagcaagctcgctcggaaaaccggcgtctcctaccgttttctatttatgcatcccagcggatcagaactaaaaaaaataagcgagtttgtcggaagtgacaagctacgccccattattgatcgaattttcccttttgctgaattaccaaaggcatttggctattcacaggctggtcacgccaaaggaaaaatcattttaaagctggtcgataaccctagctcacttttgcaggtataaatcgcgaaattgtgcaatctcacctgctgatagcttgagtccttcgcgcaagtattgctgaaatgacccaaattgctgatcaatcacttgaaaataacgcctcagataatccgcatcaactttcaaggcttcgccgattgattttaactgttgatcagtaaaaccccgttctttgagtccagcaagaatctcttcattggcgactgtgcgctcagcattggtctgaagataatcggccatgatgtcttgctcgctcacgtccagtattttcaaaatcaatgcggcgccaacgccagtgcggtctttgcctgcaaagcaatggaaaatggtgggttcgtttgggcgcaacaaaccttgaataaactggcgatacccagtcttggccgaatcactcagcgctaactgctcataagtcgccagcatattttcgtgaacattgcccttctcggtaatcatgcgcccaaggctagcattattggcggtcgcatccttgagaatgtccaacacggcatagtccgccccttcccacactgtgtccggaaattccgtccgctcgtcgtcactgcgcatatccacaatgtgcttaattcctagcgtctgaccaaggtagtgactttgatcatcctctaattcaaaaagttgtcctgaacggaaaatcaacccatccttcaccatttgaccgtgggcgttctggtaaccgcctagtgaccggaaatttgtaatctttttcaacgtcacgatgccccttcctgttgctgcggtgaagacgatgatgccgtttgctggtgtggaaatttttctagccgataaagctgttcttcgtccaccgtttcgtgaccttttttaaaggtataacccatgtgtcggtaaaaatttacagcagtgattgacgccggaatctcaacacgctccgcctgtcgaaaatagacatcatgctccaacgtgtgaatgataagctctcctactccgcgtttttgatacgttggcaacacaaaaatatcaaaaagactatattcagttgtactgccccagtacgacccaatcgcaccagtaccaacgatgctattaccgtcatgaacaatataaaaatgagtctgctcggctttgtctaagaaaaattgcggcgacattcgcttaatcgtagcttcaagataagctgatgaataatctgggctattggaaatgtttaatgtggtggcaacaacttgcgcgacttctgctgcatctgctggtcgaaatcggcgaatttgaatcataactgatcacctcacgaaacaattttggctttatcaagttgtgactaatttatcacacttattcatccattagggaaatatcgttatgtttcaccgtggttgttgccagaccaggacgtcttctaattgtccagtcgtctcatcccgatcttgctttaaaagcgtaaagccatgtcgacggtagaaacgagctgcgcctatgttcttctgataaaccgctaacgtcagcttaggataggtctgttgcagtttggccatcaacgctgcccccacgcctcttccgcgggcctgctcatcaacaaagaaaccagcaatgtcgttatcttgcaggccacaaaaagcaatgatgtcatgatcacgctgatcctgaacaagccaaagtgtggccttgctaatctgatcacgcaccagcggcacatttccagtccaatagtccgctgggataaaatcatgggcctgcaaattaccttgtagccagatcgccataatttgatcaagttgcgggggtgttggctgggttactagttgaatcgtataagttgtcatcttaacctctgaattcactgttttcatgtgaaactttagctgcatcgtaacttcaagccatcagtgccgcttttaaccaattgctgtcacattcgcaccttttttcccattaagcagttgcgaaaagatgtcgtaccgatgaaggcgcggtgttctcgaatcgtactgtagcccatcgccttaaaaaacggctgagcggtgatcgaaacataagctgtatactgcgatgacacgactcgttgctcaagtgccgccactagtcgtttgccgaccccttcacgctgatgcgtcgcactgacgtaaagccgatccaagtaaccatcagacgccatgtcagcaaacccaatgattatctcggcttcatccactgcaaccaacgccacgtgttttatgaagctggcatgccacgccgcaagcgatcgctcatggccagcccaaacggcaatctgatcagcggtatagtctttcgcgttgattttttgaacggtgtctctaaaaagcgccaaagtaggtgccgcgtcacttggctggtaggctctgattatcaacaaacgactcctttttgatagacactttggagcggtgtggcggctggcaagccgattgcctgcttggcttgggcgaaaaatgtttctggtgtcatgctcaaaaccccgtttcttcttgtcaatatcaaatccagctgattgcttactcagctctcaactaaaaaccagtcggcgatcctcacgttgtccctatttatgatagggactgccaatattaatcataaaggcccgataaatctgttccatcaagactaagcgcatcaattggtgcggcatggtcaacttgccaaaactcaaagtatcattggcgcgtttcatgactgcaggcgacaagcccagcgacccaccgatcacgaaagtaatgtcggaatgcccataggttccaagatcggcgatttctttcgcgaaaacttcggatggccgctgcttgccttcaatcgccaaagcaataacccattccttatccttaattttgcctaatatgcggtcgccttctttagctttcacatcagccatctcagcctcggagagattctctggggctttttcatcggcaacttcaacgatcttaaccttagcgaatttatccatgcgctttaagtattcagcaatgccgtcgcgaaaatacttttcctttaatttacctacgccaatgatcttaatgttcatgttggtatgatctcccatagtctcgttgtttgaccgattttttctgtttcaagtataccagacgttctgggtcgaccagcaatgcatccaacaacaaactggttgggatcgttgagagctgatgtagggacgcccaacaaaaataaaacggctaagccgctcgcgtatagttgcttcaaaacgcgttcgcaggcccagaaaccgggcctgttcacgctctgcctgtttgcctattgtcaacgttcggattatggcgcaaaatagtctggttgaggttttttaatgaggtaaattgatgattgttattcagcgtctgatcaaagatcgggtcctgcagatcaccgccttgttggtcgtcataagtctgttcattggccggccaaaagcaagcgacataagttttgccacattatggtcaattctcgccatgatgacggtgattcaaatcttcgagcacctacatattcttgattactgggcctatcgactgacttcccgggcgaaaaacacgcgacagttaacgtggtggtttctttttcttgcgatttttgccagcatgtttctttcaaatgacgtgaccgtcttgaccttggtgccgctctatctgcgggttgccaagaagtatcagttacccgagattctcccggtaaccttgattggcatggccaccaactttggaagcgccttcacaccatttggcaatacccacaatatctttctgatgcaccaatttcaaattgacttgcgccagttcttcggctggtcaattccgttacttgccgttagctttttagtgttagtattgctaagccttttcttgcgtaatgtgcctgtcccgaatgtcccagctgaacacatccatattcaaatgcggccgaccatgtttgccattgccgttgcgtgtgtcgtcttcgctggggtcattggtcttgttcctgcttggttaggggctgttttggcgattgccttatccttagcactggaccctaaagatatgcgagacgttgattacgcagtggtcttaacgtttgctggctttttcattattgtcagcgtcgttggccagattccatgggtaatacacttccttgctggtttggaaaattcagaggaatctgtttatcttagtggtgttttcaccagtcaggttatttccaacgtcccgtctacagtgctgctggcacgctttacaggttatgttgaggctttattttatggatcgaacatcggcggtgttgggacactcgttggttcaatggctaacttacttgtcttcaagcaatacatgatttatggtaaccggccacatactcgtttttttgtcggctttacgatttttaacttaattggtttgattttgttgggttgtgccggttactggttgacggttcgttaagaagcaatgacccacctcaaaaaagtcagccaattcgacatgcttcgttaaaaatcaggtcatgacagtagtcaaatattacataacaccggtaatgtatgcgttttcattgcttttctccggcaacgtgctagaattaggatttgctaaaaggaacagcgacattcgaagcgaaccaccgcgacaggttatttatggacctgtcgcactttgtttgtacatcagttgagctgttctataatgcgtctgccaatgaagcaagctgtctatctgcctcctgatgtgatgatcaaattttaatcatcacatcaggaggtgttggcaccttgtccgctaaagatattggttgacgctcgctcttaggaggaagtatttatgaagcgcaggacgttgttttcgatcatcgtcatcacgctgaccgcaggattttttaccttattttacggtatgcatagtacttggacagatacccggtcagcgcaggccgttcaagccgctaccgaccaagtcaatgatttgttcaaggatcaatcgcatcaattaccttcagaccagctaaataagcaggctatagcagctgccgagaccaaattacaacaggctcgtcagaaggccaatgatgcagaccacgctgccgcacttgccagcgctcaagccgatgttgatgccgctaaacatatgctgattgttaaagatgctgtcactcaaaattcaacaaaactggatgagctaaaaacgttgtcagatgagtcgcagcaagcattaaccgagcttgccaaacagaaaccgacatttgtccaaacctatcaggaacgggtggcacaactgtctgatcaagaagcggctgtcgcgaaaatcgccagtctttttagtgacactgatttcaagactcctaagccaaatctgagctcggcacaagtacaggctgcattggctgccgttgaaaaattggacaataaacaattcgccgaccaagttatgccgctaatcagtaccgctcaagatgccactgccggagaagacagtcgtgacaccgaaccgtcagcatcgtcagtactgcctagctccgccgatagtagtcagccatctgttgcagacagcagtagtcaggctagctcatctaccgctagcagcagtgaatcggagcaaagtcaggcatctagctcaacctcgacagcaacttcttcatctagccagaatccgtaattttttggatcactaaccgatactcaggcacgcgttgtctgtcaaaaaaatgacgataccgcacacatgcagacttgtgcggatcgtcattttttattggccaccgctaaaagtcagtgccaattaatttgctgttttcgtcttggccaattgcggcactaactgggtcaaatagtcgataaagctcaagtaatcagcaatgaccacattttcgttgggaccatgggcggcagaatgggcattgccaatgccgcatgaaataatcggtgcgtgattgatatcataaaagtacttcatcggtccgctgcctggagagttcagctcaacttgaacatcatcatccccataagtcgtacgcgccagttgcaaagccgtctgaacacgtggatcgtcaggatcggttctaaatggcggctcgcctaggaagtcagacaccatcacatcgtcataaccgccagccgtcaacgcttctttgactagccggacggtctctgccggtgtctgatctggcaccaagcgcagatcaagcttcgccagcgcggtgtgcggcaaaatggtcttgccaatgccgggaccctcatagtcgctggataacccgttgatggtcatacttggccgattataaagggccgccttaatgtcatcagctggccccgttgccgggcgggtaatgccgtagttcttagcaaacgctgcatagtcaaaggcggcgtcttgaattaacagcttttgagtagctgtcagcggcttgacgacatcaagaaaatgcggaatcgtaatctcatcctttgcatttttcaatgttgctagagcctgaaccaaccgccatgccggattttctgtgatcgcccctaaactagaatgaagatcaaaatctgccgttttaacgctcagctgaaacgcgacgccacctttcacgccaagcgagatttgaaacttgccttgctcatttcgaccgccagattcccataggcagaagtcagcggctaacagatcagcatattgcgctaacaggtgatctagatttggactgccttgttcttctgccccttcaaccaagaacttaatggtacaaggaagactgccttgcgcttgcaggcgctgaagtgctgccaagcgtgccgccagttcacctttatcgtcatttatcccccgagcgtacagatgggtgtcggtcattttcaactgaaagggatcactttgccataaggctattggttcagctggttgaacatcgtaatgattgtagaacaagattgtgggggcatctgctgtctgcgccggaaaaaccgcgtacacagctgggttggtgcggtctgtgtgcaagatgcggcttgttgttgcgcccagcttggtaaactgggttcgtagaaattcggcggtttctggaatttcattttcctctgctaaagagacggaatgaaactgtaaatacttcgttagaaaatcctgcatgggtattgtcatttttcgacctgctttcttttgtcactatttgaagtaagcgtgccggtattccgccggttgtaacatgctgtagtgaagcccgccaaccttagtattgatcagccgactattagcactttggaaaacgggaatgtatcccgcaacatcaataacccgcgcattagcggccaattcttcctgataacgtgccttcgcgctttggccattggtgttatttactttagccatcaaggcagtgaactggctatcactgaacttagaaaagtttgaaatgttagtggctgtggcggtattgagatagtcggatgggtcttgaatcgttgagttccagctcatcggtacggcatcaaacttaccatcaagtgagcgttgaattcgggtcatttttggcaagctgctgacggtaacttttaactgcggtagaaccttggtgagctgactttggatgtactcgccgacttgtttatcggtgtcaacatctgaggtcagaatcgcaaaactgatgctgtcggtatgcaattctttcaaggccgctttgagataagccttggctttagttggtgaataagtcagtggtgtgtcagcatctgcggtgaaatctttgccagttgatggattcgtggctaagccttgcggaacaaaggctttagcaggcttggagccgtcctgcaacactttagttgtcatggcttgacgatctaacgccgcagagacagctcgccgcaaattaacattgttgagctgtgggttcttggtattgaattgcagataattcatgttggccgccactgttttggtcaacgcaggatttttggcttctttttggattaagttgcccgacaacggtgcatcatcgagcttgcccgttgcaaaaaggttatcgatcgtgctggaatccttcaaaaccgtcacatgaactttagcgattttgacagcctttttggcaaaatattcgggatctttcacatagtcccagctatcactcgtggtattaaagtttttaattttatatgcgccattggtcacgattttatccgcgctcgttccgaattgcttgccataccgtttcacagcggcttcattagtcggataatagccagtcatctgactagcaaaatagggggttggctggctgagctgaattttgagtacatatttgcttggtgccgaaacacctaatgtatcaggggatttcttgccagcaacaatgtcctgatagttagcaatcgcatcgtattgatatgcaaattcggttttcgtcttaggatcaacgatgcgcttcaaggagtaaacaaaatctttggctgttaccggggtaccatcactccacttgcatctttgcgcagcgtcaacgtatatgttttcccgccatcagttggtttgacaacctttgtcgccatcgccggaatgatcttcccgtccttatcatggtcgtaaagcggcgtcataatttgttccaaaataccgccgctggttgcatcaacggcatgcgccggatcaagtgaactggcctctgtgctgacggcaacgtttagcgtacgctgggtcgttgcagccttggtttgctgtccgcatgcagcaagtagtgcggtgatcccgaataagcctaaacccaagaaaacatgctttttcatttttgtgcacctcgtttggttgatttgtgtcgcgtgctgccatcaagcatgttttgcttgatggactagcttccataacgcgctcgccagcccagaaaccgggctgactcgcgctcacaaaaaaagccgtccataacaaacatcttgttaaggacggtttcccgcggtgccaccttagtttgatcaaagagactgcgcctgtgtgatggtagcatctggcagtgtttgatcacgcttagcccgaggccaacaccccggcgacaactgacgtatgtcaacacgtttccccgtactcgaaaaactttcgggggaaccctcagtggtccatttactgacctgcgttcggccggactcgcagcatcgccggctctctgtacgtgcacaatcagcttgatctccacttcaaaggtttgcatgaacggttatttgattgactcaaacactaaccgaatacctgcatggttgtcaagcatccaccgtttaaataacgggaaacgcttcgcgaggcttataaaataacggctttccatttcctcaaaaagtgtagtcatgctgatccagcaaattttggcatcaagagcattcagttcggattatcaggaaaaaactaaacagcatgaaaaaaggtgcaagttcattctcatttttgaatgaacttgcacctttttagtaaaccccttatattacaaatacattaatgtgtaacaaaaagaagttgtttcgtgacctgtttgcaatggtcttgttaagtccggcccgtataattaggatattggaggtgccatcaatgaagcgaaaacatattttccaaatcttgatcgtaaccctgcttgcaggttacttaaccgttttttacgggatgcggaatacgatcgatacctcatttgaacaacacgccgtccaagcggcaacgcaacaaatcagccaactatactcgtcatccaagcgaactttccctgcgaaacacttatcacgatccatggtgaccgcagctcaggccaaggtcaaccaattagttcataacgtggaaaatcgcgatcaaaagaaaattgtcgccaaggacaaacgggatgctgacgctgccagtaacatgctaacgattcaagaggcaactaacgcccagagtagtaatctggcgcagatcgaatcggaaggtacccgagccagtgcagcctataaggccattgtcgcaatcaaaccggcatttgcagctgactatcagcaagctgtcacacaactttacaagaaatctttagcgattgcgcagatcaaaaaactttataacgaccagaatttacagcacccaaaggccgatctgagcagcagtaacattggcctagccatcaacgccattgaaaatgtcgaaaatcaggactttgccaaaaacgtgttgccattggtccaagtagcgaagaaatcacaagctaacaatgatacgaccgtggcaatggaatcgacagacacatcttcaaccaagcaaaccgcaactactggtcggcaaaatcagcaagacactggtgaaccagctaacggcgtgtctgggaatcacgcgacaactgcaggtcaagcttctgatcaaacaagtcaaccgagccagaaagctccgagtcaaccgactacttcaccgagtgggacaagttcaagcaccgacaataatgctggtgcaagtgcttcctcgtcaatatcagcatcagccaacaaagcagagcccatgacggccgttttgagcggcggtttgtataaaacctatgacgatgcagttgcatccatcaaaatccaaggcaaagccgttgatgacatgacgatcaggtctgtcacaatgagcgacggttcctttcagtggacttggggaccaaacggcgacagtggtagcagtagttcaaaaccaagttcctctgcgccatcttcttccaatcccacagggcaagatgcaaacaaaaacagtcaaccgcagcattagacctttgctactttcaaaaatcgctgataatggcctcttcacccaccatcatcggcgtttcgctacgttatcatatgattcaaacaacgtttaagtctcacaaaagacccgcatcagttcgacagctacgtcgaattgatgcgggtctttgggttttctactagttgatctgctgaatctgttcacgttcagcagttgcccggacaggatccacaagtgcctgccgatgcaagccattgcgcgctcgcagagcatagagaatcgtcacggtatcgacaacttcttgcagcattgcaccaataattgttggaatgacaccgaagctggcgattaacatcaaacctgtacaaatcgcaatgccgatgaggaccgcttgcttggcaatgaccatggtttccttagcaattaaagtggccgcagcaactttcgccaaatcgtcgcgcagaaccacggcatcagccgattcgcttgccgcggttgccccatgtgcacccattgcaatgccgacatcagcaatcgccaatgaaggtgcatcattgacaccatcaccaaccatcacaactggccggccatccttagggacgttatccaaaacttcaatcttctgttgtggcaattgttccgcatagacttggtcaatgccgacctgtgccgccactttatcagcgattgactgctgatcgccagaaatcataatcagcttagcatcatttaattcgtgcagtttcgtcatcgtttcttttgcttctggacgaatctgatcggaaaatgtgatcgcacctgcgtactggccatcaacattcacatacacggcagtcgtatcaaccgtagccttcgtcccagcaaactcggctttaccgaccttgactttgcggccatccaccgtggcattaacgccaaagctagttgtttccgacacatctgtcgctggcagccgatcagctgtcggcacagcatctgtcagtgaacgcgccaaaatatgagtcgattgaccttccgcacttgcggctagcttcaaaagctgatcctgtgagaaaccggcttgtggcaaaatcgtcgcaacttttaaaataccgcgtgtcacggtgccggttttatcaaaggcaaaggttttagcatcacttaacttttctagcgtagtccctgacttgacaatgatcccgttgcggctattacgactcatgccggagaccatcgcaattggcgcggccagaatcagcggacaaggcgaggccacaaccaatacctgtgcaaaacgaactgggtcgccagagaagaaccagccaagacccgcaatcacataagcaatcaacgtaaacggtaccgcataacgatcagccatccgaacaaaatgtgctggtcgcgcttcggattccttaaccagtttaataatcccttgatactgactatcttcagcccgttgcgtgaccttaacagttagggcagcgtcaccattgacggtcccagacataatgtcactacctgcgtttttggcaaccggtttagattcacccgtcaaactggcttcatccaccaaactctcacctgccaaaaccgtaccatcaactggcacgacttcctgcggcttaaccaaaatcgtttcgccaacttggacggcctcaacttcaacatcttcaacgtgtccatcaaccatacgatgcgcggttgtcggtgcattttcgagtaattgctttaattcactgcttgcttttgttgctgcgtagctttcaagcgcatcgccaccagtcagcatcaataacacgatcatcgcagcccaatactggccaaccgccaaggtggcaacaaccgccgtaatggcaagcaagtcaacaccgaagttaccagaacgaattgtcttcaccatgccccagaacataattaaagcaatgattgaccccatcaccgtgatcagcccttgcgcgatcaatggttgctttaaaccgaaagcaaagactagcgcaatggcacttacagcaagcaccatcattaattgccagttctttttcatcactgccactccctttttctaagtaccccaattataaccattacaatctgaaagcacaaccttttttagaacgaatataatctgtcccacttagatgctcgacattcatggtttctattaattgagccatggctaaactcttctaccgaaaattaactcaagtgtccatcatccccaaccagaatcttaaaccggcaatgattgaccccgttaattttatggcttccctaatattcacttcatattatacgcttctcatatgataaggctcacataacttgcttttttaacaaaataaaagaccgcaccattaaaatcggtacggtctctcgtatataaatgaagctaggcaaataattcgtagatcaatcaatgttgatctgatgattgcccttttggtcgcttgtcatttttggcagatcgatcgtcaggacaccatcattgaccttggcgctgatctgaccttcattgacatttggcagccgataactacgactcatgcggccatagctacgttctgacattaacatgttaccgtcgttgtcagcatgatcagcctgctcctcatgtttaacggcaatgctgagcacatcacgatcgtaactcagactgatattttgcttctcaatgccaggcacatcaactttcacaacatacgcctgatcgttttcctgaatatcagtctttagaacccgactgcgatcaacatttgctggtgtcaagctgtcaaaaagatgacgacccaaatcgttaaagaaaggatcgctcagccaatcattacgacgcatcaaatcattagccatattcgaatacttcctttcatatcgaaggcatttcatgtcttccctacaacacctttagtgtaccacaaaaattagcactcgcaaacgtcgagtcctaattttgtggtcctattcaatgactggttgatgcaaaaagtgacttaatagcccagagctaccttagcaaattttgccgcccagttttgtcatgtcatcccgacgttgtgcatcattttgtggtaaggcagcgtccttattcaaggtcacagccccatcaagaatgccgctgtcatcacgcagagccaacgatgcgtttttgaaatcaagtgtcagaccactgccgaaataatccgtttctgggtcacccgttgtcagtttgaaaccagcttcgttgtccagtggcagcgcataatcttgatcatcctcatcggcaaccactaactgatatttatttccaatggcacaagaaccgccaagtttggaatatttgcttgagccgtcatccagtgccaagaataaccgttgatcctgattgacatgatccttcaagtaagtgactgctgctggtttgattgagatttgcatccgaaccatcctctctattgagttgtgcacaaccttttaccttctttatcgtactcacatttccaaatgaagtcaaattccgagtttttcgcaacgaccaacaggttatccacacgtcttatccacatgttcataacttcatacgccaaatatagtattaagtattcgaattgacaccaaataggcgatttaaaaaattcaagcaaaaaatttttaaaaagaaatcatccacagtttttgatcgttcgatttcacaaacttcagctcacgcatcccgttccagccgctgggaacaaacgttttgtcacaagttaaaaaagtttatccacaggttatccccaagtcagtgaataacttagtcacaccccagaatcttagttatgaacagtatccacagagttatccacaggtaaagcatcaactttaggtaaaagttacccactcttgacaaatctttttcttgaacttttccacaggttggccccttgaattttcggataaaagctcaaaactgcagagaaaccgcttgccactaacttcgcaagtgcatcaaaaaatcctcgagccagaaacgaacattttctgactcaaggattatctatttgtgtgatttagttcttaaggtcgcttgtcgtttgcgacagcttcacagagactgtctgctgttctccggcacgatacaaagttaatttaatcgtgtcgccaaccttgtgcttgtatagctgtgtatgcaaggctgctgtgtttgaggtgcttaccccatcaagggccgtgatcacatcatactgcttcaaaccagcagatttagcactgctgccgctggtaaagccagcaaccacaacaccatccgtcacactagcaggcaacttcagaaccgatttctgctgtgttgcagaaacagtggataagtcacgaacttcgatgccaagcgctggtcgaaccactttcccgttagcaacgagttgattgatgattgaaacgacttcatcacttggaattgcgaagcccatgccttcaatggtggcattactgccagagttgccggataatttcatagagttaataccgacgacttgccctgaaagattaatcagcggaccaccggaattcccagaattaatcgctgcatccgtttgaataaccgttgcctggcctgttgtgttaccactgtcatcagtgacatccactgtccgactctttgcgctgacaatccctttcgtcacacttgtcgcgtattgggaaccgagcggagaaccaatcgctaagacagtttgaccggtagcaatcttgctagaatctccgaagctggctactgtattgaccttgctaccatcaattgtcagcactgccaagtcagacgtcgagtccgtgccaacaagactggccgttagtttcgtaccatcgctcaaaatgacttccaacttatctgaaccactaacaacatggttattcgtcacgatataagctttgccatctttcttttgataaatgacacccgatccttcactggcctcttgaagactggacgaactgctctgcgaactactactgctttgactgtcttgtccaaaaataccttcgagaccgccaaatgtgtctagaccatcactgttgctctcggctttttgcatattcacaacggaaacgacagcgcctttaaccttcgcaaaggcttgttccgatgcactggtttcattaacagaaacgttggaaatcttggtcgtaccggctttccctgacgtatcggttacaccgagactttgactgtggttgattgccaaataggcagtcccgccgccaacaccgccacctatcaaggctgccacaacagcaacaatcgcaatctgcctccagccactattcttaggcttttttggtgcccgctgtggctgttgctcgttttgtggtgtctcttgaaagttatgacttccattatccataacggaattcctcctttaaacgcgctcgtttgcccagaaactgactcataagacctagccgtttggctgaggccgctgatacattggtttttacctggactagttcgcgctctatgggcagttctaactcgccctgattacatttataattgtaaggggcgattttgacgaaattatgaacaatctcgggattttttaatacagtctcagacccgcggtatcgcgatattagttcgtggggttgcttattttttgcaccatcaataaaaaatgaaaggcagtgaatatgcgaccggatttttgggtcgggatattcactgccttgggtagcgtgtggtagcgttggatgacggaaaatgcttaagacgccaccgctgctgctgcggaaacgcgctcgcagtcgcagaaacctccatgtaaggacctcaggcgcaatggccaaagcccagccatcacgcctgaggccacttacattccggtttctaagcgctcctgctcgcgctttgctttataccacaaacagcggatctgcaactgcaggatcggtgtcgtagatacgaaagtcgtgatcgacggctaggccttgttgagctaatagtgaagcgacggttaggtgtgcgagtggtttattattgttgtgcggagaaaggtgtcctaaataaatgcgcttggttcgcagcccgataacatccatcaaggcatcagcgccgtcctcattggaaagatggccttggtcgcctaaaatacgctgttttagtggccatggataaggccccgttcgtaacatctcaagatcatggttacattccatgacataggcatctgcatcacgaatggtacctgcaacacggtcagaaacataccctgtgtccgttagaatcgtgaaggttttcccgtcatgatggaactgatagaactgcggcgccgcagcatcgtgtgaaacgccgaaactctcaacatccaaatcacctaatgtcaacgttgcgcccatgtcaaaaagccgcaattggtcttctggaattttgccaacatttttgggcagtgccgcaaaggtttttgcattcgcatacacactcagtttcggataacgtcgtgctaaaacaccgacaccacggacatgatcactgtgttcatgggtgatgaagacactatcgacatctgtcaggtcgcgcccgatgctttgcatcagcgtctcgatctttttgccggacaagccggcgtcgaccagcaccttatgacccggcgtttcaatataggttgcgttgcctgaactgctgctagcaaggacactgacacgcatcccaaaatcttcgcccacgatcaacatctcccatcttctaccatttaactgatgaacaaattgatcatccagttgttatttcattacattctaacactaattgtcattacgattcttcataacggttcgggtaatggcattcacgcgtttaaccgtcacattgccggttgcacggtttttaacaccgatataccacgctggcacgtaaaccgtgctcccctttgcatctaacaagtaactataggccaatttagtagatacaatcgcagaattgttcggaatatcgttatctcgatacaacgtaatcaccgcatcctgttcactcattaaatttaagcggtcgcgcaaaacacttaactttgcaaggtaagtttggctataactgaccaaccgatcgtcaactacatgcaaggtcactgcagcccgccgatcatagatcaagccagccttggggtgctgagcaaagacaacacgttcatcactggaaagcgccggcgcatattcgtattcgctgccatggtaaatactgtctttcacaaatgtcgtcagttggcgtatttgctgactctttttcaaagtgatcggcgtgtctaagcttgcctgcaactcttggtaatcaccttcactgatgctgacctgttgcttcaccaacttgctgtgcgcagcacttaatgctgtgttcgcctgacttgcaagataatcgccttctggtgtttgcttgctcaaatgcggcagcttaatctggtcacgcgtaatgtcggtgatcgtggcggcatctccacttttggttgttgccaaatcgacctgctgcgcctgaaaaaagctaatgcctaagaaaatattcagaccgacaaacacgactagaaaaatccattcaatgcgtcgaaaatccacaagatcgcctccctcagcgtgcccgaagctgcgttgttacgctgttaacatgacttattgcgactgacttgaacctgatgtgctgacactcgcgcttgctgcatcattactcggtgtagccgtgctggcagctgtttgttcactagcagcattagcctgctgatctgtttggtgattgatccaactctgataatcgcggtattcgcctttcatctcaatataatacgtcggctgcaaatcgaccacttgttgatcattgctgctgcccgtccattgatagccaatcaaaatatccgtaatttgattggcgcgatagccagcggcttctaattgactcaggatcgtcgcagttgctggcaaggtctgggcagcttgatcggttgggatcgggacggtcaaattggtgtttgagaaattaatctcttcagatgtctgggtatagcgcaccgtaacatcccctttttgatagccattaaaaatcggaaagccctgaacaaaggtcttatagataacagcactgcgacttgcgtcatattgaaaataacgcatgctggccagattggtcatctgcaaatcactaagcccttcaaacgtcgcatggaagaaattagctaacccagtactaggaaaattggccgcataattttcaaactcgattgccccagtggatgaatcagctgtcatccgccgagttgatccggcggtgtataacgtactatcgccaatttctcgtgaatccacgttgctggcggttttcgatggcattaacagcgaaacatagtaattagcactctgttgatccatcagataggcatatggctgcaacttaattggacgggtgaagaaagcgacttcgctattacccaagcgtctctcctcgaccggaaaggcccctgtagcttgtttagccaccgcatcgcgtaacttgttggttgtaacgttagccattttggcctcgtaaaccgttcttgtcgcgtcattgataaaaatcagtttattgcctgatccatctaaatcaaacagtatccggttaaaatgaaagtcagctgattttagattaggctgcttgttaaagaaccatcgttcaaaatgattaaaactcatcacgtcttggtaaactaattgcagactgccattttgagtcaaaaagttctcatagttattctgcgaaacttttccaatggttttgatctgttgcatatgccaacttgccatctcttgatggacacgtgatcccatactggcatttgcctgaaagagcatttgcttctggtcgccatgcgtgtagtacacgcgactaggaagataaaccgttgcttccatctttttaacattgggatcattttcagttgtgacctgcatgcttgaagtactgcgccgttcctgacgcgatggattacgccaaattaaggatgtgaaaataaaactcaagatcaccatggcgatcaggctgattcttaagatccaattactaagcttcatcccaatcatcacctccgtctgtgatcggttcatacggcagtgagatatagaaggtgctgccgcggccttcttgcgaatcgacccaaattcggccatgcaaggcttcaacaacttccttcgagattgccaatcctaaaccggtaccgccttgcttgcgtgatcgtgccttgtcgacccgatagaagcgatcgaagattttgcccagatcttgacgtggaatgccaagtccttgatcactaatcgataggatcacgtggtcatgcgtctggaacagccgcgccgtgatggtcccgccatccggactgtatttaatcgcgttgttcataatattatcaatcacttgcataaacttatcggtatcaatttcgacccataagtcctgatcagtaatctcgcgcttaatcgagtaccgtttcttttgaccatctggctgtggcaacggttgtgccgttttggcttcacccgtgtgttcattatcggtttttaacatcatgtcaaaacgatcaagcacataattgaagaattcgttgagattaacggtttccaaattgaacttgctggtgccagaatcaagccgtgacaagctcaagagatcattaatcatccgaatcatccgatccgtttcttcttgggtcacgttgagaaaacgtggcgccagctttggatctttccacgcaccatcactcaaagcctcaatgtaactgcgaactgatgtgaggggcgtccgcaattcatgtgacacattggaaacaaattctttgcgatcacgatcaatcttttgttgttcggtgacatcgtgcaaaacagcgaccaaaccggaaataaacccggtttcccgctggatcagactaaaatcgacacgtagaatcaattcatgatccagttgctccgaaaagtccaacaacagttctgtttgatgttccagcagatcgcgcaacgtataatccttagcgatgttcaacagctttagaattgaaacaccgatgacatcttcattcttggtgttcaggaaattcagtgccgtctggttgatgatgataacattcccacgccgatcagtcgcgataacaccgtccgtcatgtgagccagcacactatccaaccgccgacgttccgcttcagacgcctcttgtgcttcttcaacgcgaacactgaggttgttaacggcaactgccaactgacccagctcgtcttgtccataaatccgaacctgtccagaataatcgccgcgcgccatgcgaatcgcttgcttcttcatttcatcaattggacgagtaatagcccggctgatgacaatcgatagtaaagtgcccagtaagccagctactaaacttgagattaggaaaatgcccacgattttattgatgctatcgtaggcctgttccatagatgccgaaatggcaatggcgccgatcactgaattgttgtcgcctgtcgcattcggatttttgatcgggatcactttataataagttgatcccgttcgatcacggtattcatagccttcgtattgctggccagaatacaatgtgtttttaatgctggagttagctgacttttgccccacattggtttgcgcattaatatcactgtcgccgcgaatagtgcccttcgcatcaaccacttgtaaatccgctgagttggcaatatctgcctggctcaacgtgcttttaatatcatcattggcgccttctgtatcagtccgcaacaaatccgcggccagcttatcttgaatatagctgtccacgttcacactggtcttaaactgctcaatgttttgctgctcaagggtcttaacaaagtaagccccaattaactccaacgtcacgactagcaagagaataaagacgatcgcaattttgaagtggattgactgaaagaagcgaatctttttattcaacagtggtgctcctaattattcagcatcgggattccgcagatagtaaccgacaccgcgtcgagtcaccagccattcagggtgagacgggttgtcttcgattttttcacgcagacggcggacggtcacatcgacggtgcggacatcgccaaagtaatcgtagccccaaacggtttgcagcagatgctcacgggtcatgacctgcccaaggtgtcgagcaaggtagtgcagcagctcaaattcacggtgggttaattcgatgttttcaccgcgtttagagactgtataggcatcggggtgaatcgttagatctccgacttctaattccttgtttgcttcgtcttcttcattgctggctgcattggatgatgcggttcggcgcaagttagctttgacacgtgccaccagttcacgattggaaaatggtttggtgacgtaatcgtcagcaccgagttccagcccgagcactttatcaatttctgagtccttagctgtcagcataataattggggtgtcatgttctttacgaatttgtcgggcgacttcaagcccatcaatttttggtaacatcaaatcaagtaaaattaagtcgggtgactctgcttcgacttttttcaaggcttcttcgccatcataagcggttacgacatcgtaaccttctttatccaaattaaacttgacgatatcagagataggcttctcatcgtcaacgaccaggatttttttcgccatcattggccctccttggtttaagatacactactatagtataacggttttagggaaagagcgcgaggggcccagtttgaaaccgaagcataagcggccttaagcctaaatggcaggacttagttcatttaagcttgaggttcttatatgcaggtttctgggaccgcgagcgcattttctacaagcacgttaggtcgcacttcgatagattccggcttgcattaaatgctgctgcaagctggctccgcggcgattgggctggaacgcactgggcacgacttttagccaacgcgcaagcccggcgcgccgtctaaaagctcggccttttcctaaagcgggaaaaccacccgctttaggaaaatttcagtgctgagcccatcgccgctccgccagcttgcctttctatccaatgtcccaatatcacatcatttcaaatcagtgctgttaattcataagcaagcttgaaagggtcagttaataaacacttcgccattcacctcgtcttcacactaaacgcgcatcgctattccggtgcttgccgtcatttaatcacccaattatgaactttggaggttgctaatatgttcttttatcatgatcagctcaggctttactatcaacggcgcggttcgggaccagtgatcgtgttgttgcatgggaatggtgaggaccatacgatttttgctaacctgattgagcaattggcaccgctgtatacggtgattgcagtggatagtcgcgatcatggtcagagttcgcggacgaatcgcttgagttatgatgcgatgacggcagacttagcggccctaatcactggcttggagcttgagcagccgattttacttggcttttctgatggcgcgattgtggcattgcagttggcgattcgtcaaccccagttagccggcgctttaattcttgctggggcgaatctgaccccgcaaggcttacgctggtattcgcgagttgcttttcgggttgctgctggttaccatccatcacctaaaatggcgatgatgctccatgaaccgcaaatcacacccgctatgttgcatcgggtggccataccaacattggtccttgcaggcagtcgtgacttgattgcacgaaaagaaacgctcaccattgcgactaatattcaaaacgctgagctgcatattcttcccggtgaaaatcacaattcgtacatcaaagacaacgcgaaactctggcaattgattcggccttttcttgctggtttaaacagaacaggctaaagtttagtctgtattttttttgcatatttaacattttacttgcatactcatataaatgagtatatattcaatccataatcacaaatgaggagtgaaacatatgcgggtaatcaaacattgggccatggccttcattgcgctggtggctatgctcgtcggcttcgctgcaaatcagccggtaccaacggcggcagcaagcgaggatctggcggcaattcaaaaacgtggttacttggttgttggtctgtcagccgattacgcaccacttgagttccatgccaccctcaatggggccgataccattgttggtgcagatatctccatgtcaaaacagatcgccaaagacatgggcgtgaaactgcagatcaaggaaatgaacttcaccgccttaattggtgccttgaaaaccggcaaaattgatttgatcgtctccggtatgtcaaaaacccctgaacgtgaaaaagaagtcaatttttctacgccttacctatatgagacacaggttatggtgattcggaaggctgataaagccaagtataaatcgatcgctgatttttccggcaaaaaggtcggggctcaaaagcaaacgacgcaggagcagcttgctaaaacgcaactcccaggtgccaaaatttcaagtctcgacaaggccaatgatgtcattgctcaagtctcctataacaagctggatggtgccgttttagccagcaccatcgctgattcttatgtggcgcggacaccaagcttaatggtactcaatccgcattttgctacccccaaagcaccaacggccattgccgtcagcaaacaaaattcagccctgctcgctcaggtcaacaagacaatcagtaaggtcaaaggcgccaaatacaagacctatctgcaagccgcttataaactacaggatcaaaaccaaagtttctgggctaaatatggcaactacttccttcgcggcgcactctacactctgatctttgcggttttgactgttttcttcgggactgtgattggcacgctgctcgccttgatgaaactaagccacagttggtttgccaaggcaatcgcgaacgtctacatcgaattcattcgcggtaccccattactggtgcaggctttcatcgtcttcttcggaacgcaaattctcggtctcgatcttagcgcattcgttgccggtgccatcgccatggccatcaactcaggtgcctatgttgccgaaatcattcgtggtgggatcaactccgtcccgatcggtcaaaccgaggccgcccgttcactcggactccatcaaggtcaggccatgcgttatgtcatcctgccgcaagcaacaaagaatatttggccagcgttgggtaatgaattcgtcaccgatatcaaggaaagttccgtcttgtccgtgatcggtgccactgaattgatgtttgaaggaaccgtcgttcaaggtgcttcattcaaaccattcttaccgctagtcgttgtggcaattctctacttcatcatgaccttcaccctttcacgcctgctgcgactgattgaaaaacgctttaattaagatcaaagtaacgctcaaatagcacctcaaaactaaggaggatttttaactcatgacagaaaaaatcgtactggcatattcaggcggcttggacacttcggttgccatcccgtggttaaaagacaaaggctatgaagtgattgcggtggtattaaatgtcggccagccaaacgccgactttgacgccattcagcaaaaagcactgaacgtcggtgcactcgattcgattgtggttgacgcccaagatgaatttgccgatcactatgttgccccggtcattaaagctaatgccttgtacgaaggcgactatccgctggtttccgccttatctcggccattgatcattgaacatctggtgaaaattgcccacgcgcaaaatgccacagcgattgcccatggttcaaccggtaaaggcaatgaccaagttcgctttgaagccgcgatccacgccttggacccggaaatgaaaatcgaagcaccgatccgtgattttcactggtcccgtgaggaagaaattgattacgccaaggagcataacgtcccggtaccaattggtaaaaaatctccttattccattgatgccaacctctggggccgtgcaaatgaagccggcattcttgaaaatccttggaatcaggcaccagatgatgcttggggtatgaccgtttccccggaggccgctcccgatgacccaacttttattgatctcaccttcaagcaaggcgttccggtggcgttaaatgatgaacccatggcactggcaacgatgatcaaggagctaaacaagctggctggtgacaatggcattggccggattgataaaatcgaaaatcggctagttggcatcaagtcgcgtgaagtctatgaagcaccagccgctgctgtcattatggcagcccaccacgatctagaaaacctgacgcttgaacgtgacgttcagcattttaaaccaacgatcgaagataaaatcaccaacatgatctatgaagcgcagtggatctcaccgttgtttgatgccttgatggcgttcattgacaagactcaggctgtcgttaatggcacagtgaaaatgaagctttacaaaggcaacgccacagccgttgctcgcaaatccgcccacaactcgctttacgatgaagatctcgcgacttacacgagcgctgattccttcgatcaagaagcagcagctggctttatcaaactctggaccttgccgacaaccgttttcgagcaagtcaaccatgtgcactccgaggaaaaacaacatgactgataagttatggggcggtcggtttactgaaaaagcggcacactgggttgatgcttttggagcctccatcggttttgatcagcaaatggcccaagaagatttggagggatcgcttgcacatgtcaagatgctgggcaaaaccggcatcatcccccaagccgatgccgacacgatcacggcgggtttgcagcatctgcagaaggaattggctgctggcaaactgcacttcacggttgaaaatgaggatatccatcttaatatggaagccctgttgaccgctgaaatcggccccgtcgctggcaaactgcacactgcccgctcgcgcaatgatcaagtcgcaaccgatctgcacctctggctgaaacatcgcctaccaacaatcaaagaagctttgaccaacctgcaaaccgtgttggttggtcaagccaaggtccacgcagcaacaatcatgcccggttatacccatatgcaacacgcccagccgatcacttatggtcattatttgttggcgtatttcgaaatgttccagcgcgattgggaacgtttcgactttacccaaaagcacaccgacattttgccattaggggcagccgccctcgctggtacgaccttcccgattgaccggacgctggttgctcaagagctgggatttgaccaaatttaccacaacagcctcgatgctgtttcagaccgcgactttgcgcttgagtttctcagcaatagtgccattttgatgcagcacttgagtcgcatggcagaagagctcattctttggtccacttacgagtttaattacattgaactcggcgatgatttttcaaccggtagctcaattatgccgcaaaaaaagaatcctgattttgcggaacttattcgtggcaaaactggccgtgtttatggcgccttaatgggcttgttgacaacgatgaaggcaatcccgttggcttacaacaaagatatgcaagaagataaagaacccattttcgatgcttataacactattcttggctctttgcacattttcactggcatgttaagcgacctgaccgttcacgaaaaacggatggcagaggcaaccacacatgacttcagcaatgcaacggagttagcggattacctcgcgacaaagggtgtgccattccggcaggcacatgccattgttggtgagttggtactcaaggggatcaaaaccaacactgccttgcaggaaatgccgttaagcgagttgcaagcagccgcaccgcaaattcagcaggatgtttacgctgaattaacgtcaaaggccgccgtagatcgacggacttcgttaggtggtactgcggttagcaatgtgttgaaagaagttgctcgcgatgaggaaatgattgcttctcactagcggtacgtgatcaccttggcattcacgaaataattgaggttggaatatcgtttacaggcactaaaagacgactggtttccctactacgtggagaaatcagtcgtctttagttttttgataaatagctcgtaggaagtcaaagatcccagtaccaaggcggcgcaatcgtaggccagatggggctcagttgcgcaaacaacacagcgaccgggctttgtcgctgatgttgttaggcgacttcgagaccggtctttgggctcgaagtgccatcaccgctctagctatgcgtcgccaccccatctggccggagattgcggagtttggcacggcaaagaatctttagcctaacctattaagcattcgttttttcaagaacaaatgttgaccacgggcgaataagatccagaaagcctagatcatcagcactgacttggccaattttattgcgctgaccgtcatcggcaaatggcgttagcacaatttgaagctcgcctttgtaacggccataagcatcattcacaacaaggatatcgccgcgttcaaaggactggtgattgtcatgcggcgcaatgctttctttgccatacttcacccgcggttgtgtatcgcgcagtaagtaggctgaggcatcgccacggtagagatgcggcgcttcaaaggcaatcttcgcctcaattggcaacatccccggcagcatatcagcatgcaaaatcggatatggtgccacgaagttagcagccacctgttgcaactcagcttcactagcaaaggcattgccgatgatgacatcatcaatcaaaccggtcatgactaagtggctggtttggctggcgatgcttcgatggcgatcgctttccattgttggcagaccatcattgaccgcccatggaccgatcttgccggttggcgaagagacaaacgccgctgtgtgcagtccataatcacgatattgctgagagtactcagcaaaaatctgatcacttaatcccgtaaaggcttgtggataaaagttatgacagccgagcaggttgtcacggtccggttcataggccatgatactagccaaataattggttccgcgactcatattcagctcaatcttcagcccgtatggattacgcgtcatgcgcgcttcttcagcaccggtgaaaccttcatctagtcgcagtccccaaacattgagctttttgaaaaagctcagatcgtcatagctgatctttagctctttgaacaaggccggattgatgtcgacaatcgtttggaagcccagtcgattagcataatcaatggtttggccgaaaacagcgaacagatcctctccgtcatccccatacatctgcaataacgaggtgaagatgcgggtataaccatatttatgcgccatttcgagataggccttgttctgatcaaaactgctttgatccggatagagcgatattcctagtcgtttcattgaaaatcctttctaagccgtgtattgtgccgccatctggcgagacatctttttgaaccggtgcttacgctgccagttgagtaaaaagccggctgtgcgattgttagctttgcctttcgcggttttgccttcaatcgtttccgtgtaatgtaaagccgttttgttgtcaccagcgtcgcttagctgatagtcaaccgtatagtgatcacgatcagtatccagttcgtaagcataacgttggttggcaatggcatgggttatcgtgagtgtcccagtcatgccattagcccatttcttcttgtaagagaaaccattgagactgccagttaacacctcgcggccggtatgggccttgatgtcttcctgcgcggatcgaatgagttggccatacataaatgctgctggcaccttaaatgtcatttggatttccaagtgaaagccacctttctaaaaacgttgttcagcccaaaaccagcgtgatgggatgttagtcgagttcagtcggtttgatcttattggctgccttaacaaatggcacatagatcaggaaaccgatcaccatgttgattaattgtagcacggcagcacgccagtccatcgttgcaactaaggcattcaggaacggtggcattgaccaaacaatctgagccttaatcggtgaaaccaaaccgttaactacggcgccataggcaattgaaaccatcactaccggtgccaaaacaaacggaatgaagtaaatcggatcaagcacaattggcatcccgaacatgactggttcgttgacgttgaagaagcctggtgcaatcgataatttagcaaccgcccgctgatcatcacgttttgagaagatcagaatcgcaatcagaagtagtagagttgaaccagccccgccgatccaagcatacagatcaaaggagttccgggtccacaaatatggtaaggcttcaccttttgaaaaggcgttagtgttagcaatctgagccgtcagccagattccatcaaggattggtgccaagacgttcgtaccgtgaattccgaagaaccagaaaacctgaaccaagatcgtcattatcaacacggatccgtaaccttgactcagattcaacagcggttcctgcaagactttagcaatgaattcaattactgtagtgccatattgagtgaagatatagttgataataccgacagcatacatagcaacagcagcagggacaatcccagtaaacgcattagcaactgctggcggtacggaatcaggcattttgatggttatgtgtttcttcatcagccagatatagatggtagcagcaatggcccccatcagcatcaccgtgaagaaaccatatgcgccaaagaacttaccaaaattgaagaagccccacatgctgacatccttgccggtaactgctgccccagcatcggtcagtgacttgatcgctgctttacccaagccggttttaaccgtcatggtgaagttttgcggcaagctcatgatgaaggtaccaagcgtcacgatccccgccgtgactggttcgaccttatactgaactgccagttggtacccaaaagtgaacgagaagatcaggcctaaaattgccagtgtccctgtccagacaacggcgttaataccgatcagccattgcatggaattaacaaagcccgtccagccaaactggttcgggatatcacgaatcaaagcgttcagcaccgtcgatacggcaccagccatcatggccggcatgatggcaataaaagcatcacgcaacgcaaccagccaacgaattgagccaattctggcagcgattgggacaacatgtttattgagccaattaataagtccgttcatttttataacactcctttttaagtgggcgcgagcatgcacggcgtgaaatcaagacgtagctagctttgacggtcatgatctgcttttgatcattgtttttaagctgacagcgtcagattccggcaactgcaaacgcgcgagctattaatttgaactgaggtccccgcctcattggtccaaatcaatgttggtcgtgtggtaatacagtgtgagacctggataaacaaaataagttcgagaaaagttgaagactttgccgctggctagatagttaatcccatccagacataaaagatcgccttttccggatgtggtcatcaggtcagcatattcagccggcagcggccgagactgaatataattttcggttgtgcttccaaccatgtcataggtgttgcgcaaataggtaaagattgaccccgcagcaatttctgccgagagatgcggcacaatgatttgtggaaagtatgattcttccaagtcgtacaactgcccttttaaatagcgcagacgcacaacctgataaaccggatcgccaactgctacgttgccgcggcgggccaatgccgcagttgctggtatcaaagcaaatttgacgactttcgatttaagcggaccgcctttgaccatcgcggtttgatcaaacccgattgacatattcaagacggcgcttgattgctccgaatgatcaatgacgtagtagccactgccctgcactctgcgcacgagtccatgggcaaaaatgacatccagcgccttacgaatagtgttgcggctggcttgatagcgattcatcagcacttgctcggtcggcaacttcactggatacttaccagccagaatatcttgaatcaattgctctgcaatatcgtgatacatttatgaccccctccaaaggtgtggttttgaaaacgcttgtaaaatttgtacctacgaattataatagcacaagaaacagaaaacgattacatttttttaaaaaggagccgaaaaaaatggcagagaaaaagattatgttggtctgcgccgctggtatgtcaacaagtatgctggttgcgcgcatgcaaaaagccgccgaaaaaaatggcgttgaggtcaatatttttgcaaccgccgcttccgatgcagacaacaaattagctgaggaaaaaccagatgttctgatgttaggacctcaagtccgctatcttgaaggtcaattcaaaaaggatctcgatattccggttgatgtgattaacatgcaggattacggcttgatgaacggcgaaaaagtcctcaaggcgtccttgaaggcaattgcagatggtaaacaaggagaagaagcataatgagtgaagaagatcagaacctcgaaactgtcatgggcttgatcatgaatggtggcaacgccaagagttctgcctttgaagctattcacgcagccaaagcaggcgattttgaaaaggccgacgaaaagcttaaagagtccgaccacttcctgaccgaagcccacaacgttcaaacaggcatgttaaccgctgaagcccaaggcgatcatgccgaggttaccttgttaatggttcacagtcaggatcatctgatgaatgccatcaccttccgcgatttagctggtgaaattgttgatttgtacaaacgattaagcgagaaagaagcctaggcaaacaaataagccttcgccacgcgatgacgcatgaaggcttatttgcagtggccattgtgaataaacggctgttatgaaatcccaaataatcgcaccaaaaaggcgactcagcaaatgagccgcctttttaatactatatgttatttttgctggcgacctgcctgccattcttcccgcagaataccatacttaacagagtcccagtaacgatcctgataataacgaacttgtcggacacgcgcttcctcctgcatgccaactgctttagccaaaccgatcatccgatcattgcctgaccaggtggtgatacctaaatgcggcaagttgacgagtccgaagatgcgatcaatccactgatccagcgcatcttgcccataaccttttccccaatcagccgagtcatagataacgatgccaagatccagccaccgctgcagatcgccatcttcataatgggcagagacgagcccaatcaaaacgccgtttgaccaaatgccgttgacaaacggattggcaacccattgaaagccagtttgattggcctgattttcctgcagttcttgtagtgtcggtacttcttggttaaaatacggtccgtcccactgatgccattcagcctttggatcagaaaaagccaccttccacagtgtttctagatcttcagattgaaaatgttttagcgtcactgtcatgcgttcaccgctcctttgatgtttgttaacaacataccacaattattgcccaggaaataatgcaatcgtcaactatgttaatgtcagtatagcggtaaacgattcgagttaatcttagataaggagtgaatctcatagtggcagattatattaaagatatccggacaaaggttggtcatgcgcccttgattatggctggcgtgattggcatcctgaccgatcaggctgggcgcgttctactccaacaacgtagcgattttaccggtgaatggggcttgattagcgggacgatcgaatacggcgaaacccctgcccagacgatggtgcgtgaattcaaagaagaaaccaatctggaggttgaagttgtccggttgcttggcgttaatggcaatctcaccctcacctatccaaatggcgatgttgcccaatggctgtgcccggtgtttcttgtgaaacaattaagtggtgtgttaaatagtgacaacagtgagactgaagccttaaaattttgggatccagcagccgctcctgacctgtttaatcaacaacatcgggaagtcttggcgcactttatcgcaaatgaaacggggtattttgattgaatcgattgatcattctgcgtggcaattcaggcagtggtaaaaccaccaccgcaaccgccttgcgtacccaactggccaatacgctgctagtatctcaagacgtcgtgcgccgtgacatgctcgccgaaaaagacaaaccgggcaatcccacaatcgaactaattgaaacgattgctcgctttggattgcagcatcagcgaactgtcatccttgaggggattctgtcggcagcacgctatggcgacatgttgaaaacactcattgcagaagctgatcaaagtctggtttactactatgacctctcgtttgatgagactttgcgccgccatgcccatcgcgcaaaagccaaggaattcggagctgacgtcatgcgtgactggtatttgccccatgatcgtttaaatgtgccgactgagcaactcatttctgccgattggtcgcaaaccatggtcatcaaccacatcttgaccgatctggctggattgaacaatacagaatctgttaaacgcattcactgacaaaagacaacaactcgcgggctcttttccaaactgatttgatagcgtcttcttgttcttaacggcgggcaaaatcagcattggcataatcgggcaaaatattattgttttcatgggtttcggactagaatgggttcgtaaaggttagttcattattagtaatggctataacgcgctcgtcagcacagcagcttgcatgtaaggaccctgctcgcaatggtcaaactacgaccatcacggacaggccccggttgctaaccgtgctgactcacgctcactaaaaggagtgatttttgatgacaagttatccacgccgtgacccggttactgaccggctgctcaccccggaaaattctgctttgattctgattgactaccaaccgacacaaattgaatccatcggttccatgaaccatcacgctttgatccaaaatgttgtgatgacggccaagttggctaaaacgtacaatgtgccaattgttctctctactgttaacgttaaaagcggacgcaataaagacaccatccccgatttaaaaaaagccctcggcgatataccaagtattgatcgctcttcgattaatgcttggcaagataaagagtttgtcgaagcagtcaaagcaactggccgtaagaacttggttatcgcggccttatggacagaagcctgcctaaccttcccaacaattgatgctttggctgaaggctatcatgtttatcctgtcgtggatgctgttggcggcacctcacaaattgctcatgaaactgctttacgccgcgttgaacaagcaggtgcacaattgaccacaaatgcccaactggcttgcgaatggcagcgcgactggaaccgaaccgacactgtaccggattttgttaaactgctgctgggtgcaggcgactttatcaatttaggcgactagctttttaacaatatgacatgaacggggctgattaaagcagccccgtttcgtttcttatcgcttatgatgtgtacctgcccatgacatcgcatgatgccatgaacaggtaccttattttattggtgagcgtgagccagagcggttagtcaccggagcgtaagcggcctctggcgtgatggccggtctttggccattgcgactaaggtccttacacgcaggtgactgctctggcaaacgcgttatggttagggggattcaacatgcaacgttctgaaacggcaccaaaacgttggtggctactggtcgcgctgggcttttttgccttcatgaccaatctcgacggttcaattgtgaatattgccgtgccaattatggccaaggatctaaaagttccggccagtcagatggaatggacggtttcgctgtatttaatcgttttaagtgcgctgctattgccctttggtaaacttggcgaccgcatcggtaagcagcggatttttaaatggggcaccggtacatttgtcttaggttccttgatggctgggattaatctcggctttaattttttgatgttagcccggatgatccaggcacttggcggggcgatgactttggcgaatacgtacgggatcgtcacctcgactttcgcacttgctgaacgtggccgggcaatgggggttgtgagtaccttcgtcgcattgggtggtgtcgctggtccaagtctaggcggtttgattttggcccatttcagttggccaatgatttttctcatcaacgttcctatcggtttaatcgcattgggtgtctccttgtggtctatgaacaatggcatcccacaacgcggtacgtacgatggttgggggatgattttgcaggcaacagcgattgcaagcggtttttggggactgaatcttgctcagcaaagcggttttaacgatccagttgtcctcagcacccttgcattggcagtcgttgctctcatcgcctttatcgtctttgagcaacggcaacaagcaccattgcttcctttgcgtattttccgtgtccgtattttcacactcggtgtggtcactgtcttcttcatctttatggtgcagtttttcagcacagtgctgatgccgttctaccttgaagatgctcgtggcctgacaccaggtacggctggcacgctattatcgctttatccactgatgatggtcttcttcgccccgtttggcggttggctggccgataaatggaacgtcccggcagttgctttgctcggcagcatttttatcgctgtcggcagtcttatcggtgccacgttgaaattaaacgcaccgttgactatttacatcatcagtacactccttgtcggcatcggcagcggtctttttcaatctccaattggcgatgttgtcatgtcagttgttccgaaaaatcagcttggcatcgctggcagtttcaatgcgctcgcacgcaatcttgggatggtcagcggcacggcggttgcgacaacagtgctctttggcacgatgagtcaacttgctggcagccgcgtaacgaactatccaacagcacatcccgaattctttatcagcggtttacaagttgccatgattgtcgctgctgtgctcgctatcctcggagccatcgccatcggcctgacaatcaaaccgtggcaggcacacgaaaaaaactagtgtcagttttcatgacagttcatccgtcagaacacctcattttccaatgaaagcagacgattgtttcgccggtaaatcaacgttcgtgcaacaagcccacttttcccttcgactcaaaaagtgctagcataaaagtattgtgtccgcttgcacagcgtcagcagacgtgcttaggaagcataacctgaatggccgagttttgactatttatgactggcatgcttacatgtaggttgctgcgactgtgggcgtattctaatgacggaggaaaacagccatgaaaaagaaccacacctcgacagcctggttgacttggggcatcatgctggtcggtgccaatctgcggctgcccatcacgatgatcccgccgttgctgccgacaattaagcaaacactcggcctacctgcatccatggcaggtatgctgacaaccattccattgctcatgttcgcgctggcctcaccgttaatcgccaaaatgggtaatcgtcgtggtaatgaatggagcttgctggtagcgctggttatcttgttggctggtagcctgctgcgaatcattcccagcttgacagctttaattgctggtactttgctcatcggatttggtatctctggcggtaacgttcttttaccggcaatcatcaaggaccaatttccccactctatcggtgctaaaaccagtctttataccgtgacgatgggacttattgcgtccctcggtactggactcgcaggattgctaaatcagcaattcaacatgcagatcaccctggcagctttttcgttagtcggcgtctttggattactcgtctgggcgttggccttccgcacactaccaaagaaagcagcccggcaaggcgtccagcgcaaaaatatcgccgtttcgcgatccatgctagcgtggtggatcgctttattcttcggcctgcaaagctttctctactattctttgctgacttggctgccaagtctttggcaagcgaccggtttctcccaaatcgcggcaggtaatctggctaccatttttcagctgagcgggatgccggcaacattatccatcccattcattgctgagaagcgccacggcctcttatatagtgtctggggcatcatgctaggctttgtactaggtgctttgggtattcttatccctggggcgaactttggcttaaacgttgtctacgcgctgctcatgggcgttgcttctggggccgcttttgccatctgcattgtctttttccagaagaaaaccgccgatgcttatgaaacagctagtctctctggctttgctcaaagtgtcggctacttatttgcggcggttggtccagtattatacggcttcatccaaacgtctacaggttcgtgggatttattgttgtggctgacagtcgggctaacgctgctgatgtttgtggcagggctgatcatcaatgcgaaccatcggatttttccatcaaaggcgaatagatagcgcttgcaagtttctattactttttttacactaagcatgaatggctaaggaggtcacaaaatggcaatgacaacgacaattggtaaaagtacagtcacaaccgggaaactaggtttaggcaccaataaagtcggcggccacaacttgttccctaatctgcatgacgaagatggcatcgccgtcgtgaaagccgcgcttgaccacggcattgacatgctcgataccgcttatatgtatggtttagggcagtcggaaaaattaatcggtgaagccacacaaggctatgatcgcagcaaaattattctagcaaccaaggcagcacaggatccgcacaatgatctcaaaccaaataacgatcccaaatttttaacgcaggcaattgatgatgctttgttacgccttaaaaccgattaccttgacattttctatattcattttcctgatgacaaaactgacaaagcggaggcggtcaatgccattgccaatgcccgcaaggccggcaaggttcgggcgatcggcgtttctaacttctcattagaccaaatcaaagaggccaaccaagacaatcaggttgatgtcgttgaagacaattacagtttggtacatcgcgatgctgagcaaaacctgttcccgtatttgaatgaacaccagatcagtttcgtcccatactttccactcgcatccggcttgttaactggtaagtatggccttgatgatgctgacaagtttagtcgacgtttctcggcagatcagttcaagaccattcttggcgctttgcgagaagtcgatggcatcgctgatgcccatcaggcaaccttggctcaggttttcttggcttggtacatgaagaatccggccattgcggttgtgattcccggtgcccgcctacctgaacaagctacaagcaatgctaaagctttagacgtcaatttacgcgatgctgaatatgcatctattgacgagttgttcaaaaaattccgtactgaataatcgcgcattgttctaggctacagacttcgcacaatccaaaaagcagcccgcttccagcatgtcacacatgcggaaacgagctgcttctttttattatcgaaaaacggatggtgagcaggcatcactcactttttgcgtctaaatgcccgtttgataacctgccaaaacgtcagtgattgtacaattttatctgccgggaaatgatttctgatggcgcgcaaaacgcgtttcggatctcttgccgcgaaggtatatgtcccatttttcttcgttttgattgcaaaccgtgggatccatttgcctttaaagatcaccgacgcaatgaccaaatcaatctcattccacgggatctgatagaaatcgcgcacgtttttttcgttgaaaaattcaaaccctttatcgccgatcatgatcttgccatatgtcggcatccccatgaaggccgtgccttcgaccactaattcggacttcgtgttgatcgattgaaccattttccgccatccttttaaactcatcttgaacgtttttttactgatggagacgactcggtctgttctccaaacgcgatcacagtcgcagaaatctccgtgtaaggacctcagacataaatggccaaaaccccagccatttatgtctgaggccacttacactacgatttctaaccgctcctgttcacgctctccattataaaacaaaagcccagactttgcgcctgagcttccgtgattctttgttcgttttaacggttgatattacatcaagccgacaacgtggaagacaaccccgacaacgaacaggccaaggataatcacaattggagaaaccttcttcttcagtaaccacatgcagaacaaggtcagcagtaagcccatcaaaccaggaatcaagctatccaagttatcttgcagcgttaagaccttattcttggtcagtgacagaccttgggattgtaattccaaagccttctgaatacccttggatccacttggtagtgaactccagtcgatgtaagcacccttttggttaggtacgtctgatacgactggtgtgaatttgacagaaacccaacggttaaccagcgaccctaagataaacatcccaagaatcgtggcacccttcgtaacttcttgcaacagaccaccggaaaggtcttcggtaattttgctcccagctttgtagccaaattcctgcgtgtaccacaggaaagccatacgaattgcattccaaagcacgaagtacaagattggtcccatgatgttaccagccattgccaatgatgcagctaaagcaccaataattggcttaaccgtgaaccagaacactggatcgccgacaccagccagcggacccatcatcccaactttgacaccctgaatcgccttgtcatcaattggcgccccattggcacgttcttcttccagtgccatggtaacaccaataattggtgatgccagatatggatgcgtgttaaagaattctagatgccgtttcaaagcagcggaacggtcttccttggtatgatacaaacgtttcagtgccggaatcagggtataagcccagccaccgttctgcatacgttcgtagttccaagaaccttgaatgaaggttgaccgccaccaaaccttgattcggtcgcttttagttaaatgaacttcttcagccatgtttgtcaacctccttcttagtagttgtcaatgatgtcgccgacaggatcaccggcaccactattcgagctgccgcctttgcttgagccgccgcccattttggacagagccaagtaaatcaacgccagagagatcccgatggcaccaaggccgatcagggtaatctctttaactgttgccaaaacaaaaccaagcgcaaagaatggccatacttcacgggtcgccatcatgttaataaccatggcatacccaacggcaacaaccatgcccccgccaatgccaaggccagcggtcaaccagtcaggcattctttcaagcaatgcccgaacaggaccagcaccaacggctagaatcaagccagctggaatggcaatacgcaggccttgcatgcagatcgcaatccattgccacatatcaatcttccggaaactgccttcttcagcagctgcatccataaagtgaacaatcgcggttgccaaggtacgtaccaaagtggtcagcaacaaaccggcaacagccagtggaaccgcaatcgcgatcgctgaactgataccttttgtgccctgaccgccaagaaccagaataatagcagatgcaacagatgccaaagcggcatcaggtgcgacagcagcgccaatgttggcccaacctaaggcaatcatttccaattggccgcctagaatcaagcaaggtgccaaattgccggtcacaagtccgatcaacgtgcacgcgataactggctgatggaaatgaaattcatccaaaataccttccataccagcaaggaatgacacgatgaggaccagaatgacttgaataaagtttaaagtcataagtcttcttcctccgtttcaaaaaaattacttctgtgcattcagttcgtcttgggctttcttcaaaattgcatccatgttttcggcatggtctgcaggcaccttgcgaacatcaaatttgacaccgtctttttccaattgatggaaagtgtcgatatctttttgatcaaaggccaacaccttgttcggctgaaccttaccaactgaatgggacatggaaccaatgttaagttccttgagtggaacgccgccttcgattgctcgaagtgcatcctcaggtgtttcaaataatagcaatgcacgttgcccgccgaaatgcttatcgtctttagcgatcttaatcatctgatcgataggaataacatgcgccttaacgcccgctggtgcagcttccttaatcagattctttcgcaagtcgtctttagcaactgaatcagagacaacaatgatgcgtgtcgggttggttgtcttggtccaggttgtggcaacctgaccatgtagcaaccgagaatcaacccgcgccagaacatactcaagtgagcctggctgaccagcattcgaagtagttggtgctgcttgagcagctggcttcgtcactttgtccagtgattctggcttgatcttgataccttcacgtccagcatcgagcagatgtgctgcaatatcctgtgcagaatccatcgaaagtcgtgaaccatacgcttcaatcagcatcggtaaattcagtccggtcacgattgcccatttatccttatgcgcctcataaatcgagttcgcttggttaaatggtgagccgccccataagtcgatcaagaaaagcacttcatcgtctgggtcgaacttagcgatcgcatcttcgaggtgcttgtgtaagtcatctggaccttcatcgggcatgaaggtcacagcttcgactttttcttgctcaccgaagatcatttgaccggattgcttgatgccagcagcgaattggccgtgactagcaagaataattccgaccatttttacgcctcctaaaaatttgtggttgccttgaaaataatatctgcaataaacgaaaataatctaaaaaacaaggcttcccaatagaatagtatgacgtccttcgcacagctatgcaagcattttcacttaaaaaggtgcataaaaagaagcgcatacattctctatgcacttctgaaaagcgatttcgctgaattggtctattggtaagtaccaattttgcctatgttggattaagccttttgcgaatattgatcggaatcggtaaagactgggtccaaaattttagtgctcatccaaatcaaaaccaaaaataatcctgtcgccaaccctgccataacgatccaactaacatgagcactagcaaggttcgcaatcgtgaagaaaatcacttgtcctactggcatgccgatcaatgctgccaggttgaccacccctgctgtcgtacccatctgctgttcaggcacttgccgcatcatcacggtggctaaacgtggattgattttgcccatcagatatgctgtcacaaagctgaaccccagtgccgccacgatcgaatggagcaggaaaaagctgctgcttaaacccactatggccgccatcagcagacttagcaatttgaacgtgctcaagcgctgcaaaccatccttggcaaataaagctccaaagataaggccgacagaaaacacaacattgatgattgcaacggtggttccaaagtcgcgcagccataggtctggctcctgcacaagcgtgatattcatcaacccgtcaacggatgagccaagcgtattgactaacatcgcgaagagaataaccgcgaataggaattgattgccagcaagaaacttaagaactgcccggatgttaccgataactggctgtgacttgcccgtcgtcactggcggttctgcttgcttcaattgcttttttcggaagacaagcgtcacagcggctagtaaaaaggtcaacgcattgagcaagccaaaaagtgcgtaattgtgattcaataacacgatcaaactggctccaagcccttgaaaaaccagttgcacggttgaactcgttgcactttggaaacttaaggcagtgttaagctcttttgcgggaatcaagcgatgcaagagcggcagcgtcaaaccattgccgtactgacctaacgaatcggatacaatattgattaaaagtaatgatagaaatagcggaaaactggccggtagtaaaatcatgaccgctaaacttaggaacaacaacatttgtcccaaacgggttgccaccatgtgccgagttttagcatgtgtccgatctgccagactcccagttaaaagcgacagcatggtcggcacgctggttgccatggcggctaacgtcaccgccagacttttgaatggcatagttgcggcataaatgatgaacacaatattatagaggctatcaccaatcccacttaacaaactggcatttaaaatcgcacgatacccgcgattggtaagatattcatgcatctcaatcttcctcctcaaggtgcttactggtttctagacacgcctatgagttttcaaaacgcgttcactgccgcagaaacctgctcataaggaccgcaaccttaaaaatggccaaaaccctgccatttaaggttgcgcccgcttatgctccggtttctaaacgcgccagttcacgctctgactaaaacgcgttcactgccgcagaaacctgctcataaggaccgcaaccttaaaaatggccaaaaccctgccatttaaggttgcgcccgcttatgttccggtttctaaacgcgccagttcacgctctgcttatttgtatctagagtgtacgcagggtaaaatcggattgaggtgaaattccactatggtagaaaaaacaaaggccacagatggtgcggtttttcggcagttgcgacataatcatcagctaagcttagcgcaagtggcagacgaccataattcgattgcttttatcagtaaatttgagcaaggcaagtctaatatcagcttttcgcgtttaacccatttgctgcatcgcattaatatctctgtcgaagaatttgtctttatccgtgatcttcaatccggcgttgtgccgacatcgaatgatcctaattttgtgtacaacaccttaacgcatcgcgcctttgtcgaagtgcttgactatcaggatcgcttttcaactcaggaaccgacaccagcagactatgcttatttcctcaaaaaggagcaggaatggcaagctcgttatgcccaagaccacaaccgccaaacccgcttcgagctgatcagcattcaactttttcggctaaccatgattgatcgggttaaccaattaaaccaaccatctccattcaaaagtgtcgctgacgctatggcccaacttcaggctttggcaaagccagtcgtgagttatctttattcggtcgaaacatggaactactttgaactctattggtttcgccatcttatggtcgctttaccgacagccacgattcaaaacctactgccacttgccatcaaacgctcggaaaagtatcgtgcttttaaccaaattcgcaatatccgaatcaggacactttttgcggccttttccgtttttattaatgatcggcagctcaccgatgcgaaaaaaacactcgatactgccaagactttattgcatgacagtgacgatttgaccaacgccgctatgttactttttttacgcggttggtatcacgtcattgccgatcagcctgaaattggctgggagttgtgccatcaggctattagcttggcacacatccttgaccagcctaaacaagaacaacagctgcgttattcattagaatttattcatcaaaatgtcaacaatccggaaaaaagtgctttcttcctttaaacttatttatcggcagttgaagtttcacgtggaacttttgagcatttgcaagacgcgcttctggcaatcttctcactaatggcgtcctaatggcgtcaaaaatcggtactggaaagtgtcttttctcagtaccgatttttgactgcatgattgctggcgcggatctttaagcttcttggctacacccttttgctgctgcaagccgttcaattgcaggaagccacgtcgccgtccatgctggtgcccccaattgcgccagcattttttttaattgcaaaaactcttgccgtccttgtaacgccaccactttgtcggatgaataaatcataagtaatcgtttcacacaagcaatctgaaactcaatgcctagatcaccaacagttgcttgcccgataagattcaaagcatttcgtgcctcagtcaatttacccgctgccacatagcgaagcacagccgctagaaacgtgcggttagcaagattaaaatgatcctgcggcgtgttaggacgttgtatctgatttgaaaaagcagctatcagttgactcagctcatccaggccaataattttagccaattggacggcaatcagtcgtaatagtaacgaccagtcagccgtcgtcatcagcaatgactgcgcttgtgattgctcatgcggtaaaattgaaaagcgttccggcgcgtcattatgtaaggtcaaatgcaacaacaggcgttgattaacattggcgagtggcaattgacgtaaaatgctggccaattcctgaacgtcagcgtgacgcgctgccgccaaataacgttgtaaaaaaggttgcttatccctagaacgaggttttgcaaacacatcccaatctaaattcaactgatccaacaacaaaaagaaacgatcagcagctaactgtgaggtaccattttcaaactttgacaaacttgacaccgataaaatcccatgcgcggccatttttaaagtcagtcctcgttccctacgtaataacttaaattgtctgccaatcgtcatctcgcagccccctcctccttaagaaaccgctgccaactagttgttaacaattgagcaaaaaatggtgactctaataaccgcaaactggctaacatttgctcaaccgctgccgttgctgctcgatgcttaccgcgatggtacaccaataattgctgctgataccgaagcatcaatcgggaatagagatcatccggcggcactggcatactggtcgcaatggttagcaagcgaactgcttcactaaactcgcgccgatggatcagtaacgcaatgctattcgtgagaatcgcccacaaatattgatcgcgcgtccggtgactctcggtttttggcatatccagtaacatccctgccactaaactaaccaactgtttactgtcgaaaagcaccaacgtcgccgcaaaaagatccagctcataaagtccccagtgcttaattcgttttaagtaacgcataacgtcagtcttcatggctggtgttgtttgaaaactcgggtcactgaacccgttgtgcgccatgatgttaatctgattaagtcggtaaaaaataagccccgtttcccgccataaccgatactgtcgcttagccaatgccagtagcgccggtttcccagcaacagtcgcccggttcacctgctggaaaaagttatcctgattcaaggcgcggtatccttgttgaatggattcaacgtcttgatcaaaccgtgttaataattttaaaacaactgccgcactcagttgcgtctccccacgttcaaaccgcgacaaagttgcagctgtcgtaatcccagctgcaatttcttctaatgaatcattttcctcgagacgtaaagcccgcaaatatgccccgattttgacatgttcttctggcatcagcacccgacccttttatgagaactttattagacaaacttaacacgttttgccattttttcaaaatatcttactacttattgcacctcaaatttgaatatttttgtttttaaacgctgcctaaacatgggtgctagtcccaagaattttttacgcatttttctgatagacatcaggcagtagcgaaaattcaatggacgcggccataccagcgccttagccttggcggtcgctactccgaattttcacaaaaccagctcagactatcgaagcgtgcccaacaagcatcagaagagcgaatccttctactgtgccatctaaaacgtgtgagcagacgtagaaactgcacttgctcacgctctgccattataaattgacatctatccctgactccgctaaactcaattttgacatttaaatacaccaccaagaaatagaggttgcggtgggcaacgaaaactggggagtgccgtatcatgttgaaccagttgtaagtgccaccgccgaaatgttgcacgatattcggatcgtgcgcattgggccatgggtgcataacccatggactgtcgaagcactcgcttcggggcgctatgattctggtttatgactaaaatcgatggaatcgacctttattgcggtatcacaacacaataaggtcgattttttgtttccagctctatttcccactacaagaagggagaaatgtcagttatgaaaaagcattgggtagcacgtttaggcgtgctggggttcgccttgagcctcttactaggcagttttgctgccaccccggtcaatgctgctagtgatagcggcacgtttaaagtcggcatggaggctggctatgcgccattcaactggacgcaaaccaccagcgctaataacgccgtcaagattcaaggtagtcaggaatacgctaacggctacgatgtgcagattgcacggaaggttgccaaagccttacacaaaaaggtagtcgtcgtcaaaacatcttgggacggattgccaccagctctaacttcaggcaaaatcgatgccatcatcgccggcatgtcaccgacacctgatcgtcgcaagaccatcgatttcagtaatccctactacatctccaacttgacgatggttgttcgcaaagacagcaagtacgccaaagccaagagcattgcggattttaagggtgctaaaatcaccgcgcagctcagcacctatcattatcaggcgatcaatcaaatcaagggtgtcgtcaaggaaccggctatgaacgattttccagctatgcgtgtggccttggaatccggaaccattgatggttacgtttccgaagtgcctgaagggatcacggcagaacgtgctaatcctaacttgatgtatatccattttgcaaaaggtcagggttttaaaaccgatgccagtgacacgaatctggcgattggcttgcgcaagaatgatccgaataaagcaaagatcaatgaactacttgccacgatttcaagtaaagaacgagcacagctgatgaatgaagctgtcgataaccagccatcaactgaaagcaatggcaactggttcatcgcgattatgaagcaatatggtccaatgctgttacgcgggacaggcatgaccttactgatttcccttgttgggacaatcgtcggctttatcatcgggttgttagtcgggattatccggacaactcctacgccgaaaaaactcggtcagcgcggcttacgcgccgtgatcaactggctgctgtcgttgtacatcgaagttttccgtggcacgccaatgattgttcaggccgcggtcctatattatggtgccgcacaagcttggcatttgaacatggaccggaccaccgctgccttattgattgtttcgatcaacaccggggcctatatttccgaaattatccgtggtgggattatctcggttgacgaaggtcaattcgaggctgccaacgctctgggaatgacccatctgcaaaccatgatgaaggtcattttgcctcaagccgtgcgcaactcactgccagctgtgaccaacgaatttattgtcaacatcaaggatacgtctgttctgtccgttatctctgtctccgaattgttcttcagtggtgagacaattgccggacaaagcttccaattcttccacacctatctgattgtcagcgccatctatctcatcatgaccttcacaatcagtcgcctattccgattaattgaaaagcatctcgacgggccaaaagattacaacgtcatgaccaatcagatgcaggtcgaaaccccgaaaactcgtacggcaaaggagggctaatccatggcaaacgaacctttaatccaagtcaaaaatttaaaaaaggcctttggcaatcacgaagttttgaccaacatcaatctggacgtgaatgccggtgaagtcgtttcgatcattggccgtagcggctctgggaaatcaacacttttgcgaaatatcaaccttttggaaaccccaactggcggggatatccttttccacggaaaaagtattttaagcgatgaagagaaactaagcacttatcgcgccaaagttgggatggtcttccagagtttcaatctgttcaacaacatgacggtgttgcaaaatgtgatggttccgcaacaaacggttttaaagcgcgatgctgccacagctaaagcgcacgccctcgacttgttgaagcaggtcgggatggatccattcatcgctgcaaaaccggaccaattatctggcggtcaagaacaacgtgtcgccatcgcgcgggctgaggcgatggatccagaagtgttgctcttcgacgaaccaaccagtgcacttgatccggaaatggtcgacgatgtcttaaacacgatgactgctttggcacatactggtttaaccatgatcattgtgacccacgaaatggccttcgcgcgcgaagtgtccgatcgggtcgtcttcatgaacaatggcgttattgccgaagcaggcacaccggatcagatcttcggcgatccacagcaacctgaaacaaaagagttcttgaaacggtacttgaaccgaatctaaacctatggctcgattcttgggcaacaagagcttgagacataattctcagtcaaacgaataaaaaggaacaattttccgattgttgtgggaaaaattgttcctttttagtttctcgtggattattttactgcgattttaaagaccgtagtgccaaggcgaagcaatcgtaggccagatggggctcagccgtgcaaacaacacagcgactgggctttgtcgctgatgttgttaggcgacttcgagaccgcgggctttgcgggctcgaagcgccgtctccgctctagctacgcgtcgccaccccagctggccggagattgcggagtttggcacggcaaagaacttttaaccaagtcccttttacaacgattttacttttttgactgctgctcacgcttctgcttgcggtgttcgctccacgtatccaagctcaccacaataagaaacaggaaaaagccgccaacgaccgattctagtgtcaaaatcaaataacgcatggccaagtagcccttaccgcctgtgacatcccgatagccgacgtagccaaatgtcatgagaatagccagtcctaaaaccagcaacgtgtacatcagcgttcgttttaaaatgcgtttgaatgtcgtcatgcggtgacctgctttctaatgagtcttacttattatctttcaaaatcgtatcagcttgcttctgcaaattcgtcagtactgttttgggctcagcatttttcgaaacggtttggtccacagcatcaagtaagttattgcggtacgtattgtaaccaataaatggcgttgaggagaacgcatcgtcataagcatccactgctgcctgataggtcggattctctttcaagtaggcttgataagcgctggactgggttgcggtcttcacaaccggcacataaccgctagccttagcccattgcgtttgaatcttggtgctcatcaggaatttcatgaaggtaaccgcacctttgatctgatcagctgaagcgcctttgaaaacggaaatcccattgttacccagtacagaactggccttgcccgcaaagcttggcatcacagcggttccccagtgcatggacttcggcgctgttgctgcaatttgctggatagtcgcactagagccaaacccggcaaaaattttaccttgaacaaatggcacgttaaaataattgtccaagccggcagtgaccgccgtcttatcttttaacatggtcgtgatggcggtcatagccttaatgctggccggtgtgtcaatttttgcctgatacttcggcgtgatcaggcgattaccagcatcataggccaaggtttcaaattcaaaatcataacttttgttgaatgcgaccccagtaatgccgtcgtctttgagctgctgactcattttagtcagttcttcccaagtcttgggcacgctgagatggtacttatccaaaatatccttgttatagaacatcaatcgtgtcccagtggcaaatggaatttggtaatatttaccttcatacttcaagtttgtcgcaatgcccggataaatggctttgagctcatttgcggaaaattgtgacttcacctgactgtcaatgttaactaacatcccgtcatgcacgtattcaggaataatcgtatcagttacctgcccaatggttggcaacgtgcgagacttcgctgaagccagatactttttttgtaggttatcataagacccttgcgaagtagcaacaactttgtactgcttttgactgctgttgaacgtcttgatataaccttcaagcgccttgttataatttcctgtcatgcggtgccagaatgtaatcgtcactggccccttcgtactcttttgcgctgaactgccgctaccgcaagcaaccagcaggactgccatcaacactgtcgcaaacccaagcaaccaacgtctcttcatcattttccctccatcatcgcggtttgtcgtgaacagagacaacttgacctatccctattcggatataagtgcgttgtcgtcaaccacgaatagtataccaatacttaccggatcaaggggaactaaagtcaaaaaaaagaaagcgtatgccttcttttttagcatgaagctatgggatgatgtcaggcttgttcttcggtcaattttagatagaaattagccagtgtcatcgtgcgatatggtatgacccaaattgacgctaagccaaacgtgatcatttccaacaaccaccaacctaggaaactgaggagcaaaacgaagaactcccacttatggccgtacatcaattgacggctgcgcgtgacagcctcggtgtagccaattggctggccagcatcaatggcatcacgataaatcaactgggcttgtgaataagccaatcctttgacaatcccgggaacaaccaataacaacatccacaggctgacccaaacgacttgcagcaaaccaatcagcaagctgccgagaaaatattcgccacgttcaaaaattttgaacatctgcgtccagctaaaccggtgatccgaccgaccgcgcaacccgtcaatcatggcgaagctgacaccgatcatgagcagcgctgtcagcaaaccgataaatgtcactgctgtctgccacattgcgatgttgttccaataaccatttgtcatcatccgccggctgccatgagccacgacacggataccagctcgatgcatattttcattaagcgggaatggcactagcgccacaaaggctgtcaataataatgccggtaaactaatccgtaaataatagctaaagttgggattcagctcagccttggcctgatcttttaaagaagtacgatccatagatattccccctctaactgtgacaagtcatcacaatccttggggttatcataacagaaaaagacggttgagttatacaaacttcaaccggacattgggatcaagttgcggttcaccgggaacaatagcaaagtgatcaccgctgactgttaattctgtttctgctttaaaaaaaccactcgtataacttttgatcaataccggccccaccggcgaatcaaggtgtgcatcatacacatcgggtacattggtacgcggtagaatcaataaattgaatttcgcctgtcctgatgtttttgatggccgtgaataaggaccaataccgtcattaatatcaaggattagcgccttatcagcatgtaacatcggcgccaatcgtgaggcggccacagcagatacattaagctccatattttgcccccaaaagtaaaataatccttgtcaccaatattatggcgcccgaccgatcaagatacaactctcttgtaaaaatttcaccaaatgcctaaaattgggttaaactgaatttaacccgatgtgattttattcagctaggacgaggtgtgccatgaatatttattcggctttaaagtttatccaaatcgatcatgagccagtcaatcacctgcaagttgtcatcactgatcaaaacggcaagcctgatgccggcatgaccgacttattggctgactgcttgaacaaaattgacattttcgttgaccttagcacaaccgatcgggtcagcgatgtgattgatgacctcaatctgctcaccccgctgccctatgatgtccttgaagaatatcaaaaaattcttgagcagccgatcactggcgtcaatattgcgatgaaaaagcagttgatcgagttgatttacgcaccaatggtttaggtttgtttattttatcataatagcgcggccatttttaccggtgtcttatcccggcgaagatgacgcgctttttatgtgcctgcggaatcccttctttagtgaaaaatcttgcctgattcttgttgtaacagtttcacttaggtctattttctgctattctgacgaaaacggaggcgaggaaatggaacaaacgggacaagcgctaccagcaaccattcaacgaatttggcgggcaagtgctgcgttgtgggcgctagtgctcatgatcatcggtttgggactcattgccgcttggtttttctggcattggtccttttggcttgggttgggtcttattggcattgcgattattcaactgctgttccgattagcacttgtgccgtatcgctatcgtttttggcgctacaacatcacgccaaccgcggttttcttgcaaaaaggctttttcttccaaaaaaatgaagccattccgatttcgcggattcaaaatgtcacgttagaagccggtcctttacttcagtggcagacactgcaacaagtcaacatcgaaaccgccagcaccgcccacgtgattgatggtgtgacgcgaccagtggccgaccaattgcgcaatcaaatcctccaattggctcaggaggcgcgcgatgaagactgaccaaccgcaacgactcgcgcctgtcgcgctactaattatttggatcagaggctttatttcgtggtggccgttatttgttggcggagggctttcaatactgcgcgcagacatgagcttcaatcaatttctattgtggggcggcctaattgttggcgttttggtactcaccctcatctggtcaatcctgcattatttgcgatttacctatcttgttgccccgaacggtctgaccatcaacagtggtgtgttgattcgtaaagtcaatcacatcccttatgaccgtattcagacggtacaacggcaacaatggttttttctaaagccactcggtctcgaacaggttgccatcgaaacagctggcaaagaatctaaaaaagccgaaggaatgctctcggccgtgccagtagccgtagctgatgccatcaaccgctaccgtcaaggaaacgttcagccagtgacacctgatgcgactgataatcaggctatccctgctgcacccgatcaaacaagcaccaccgccgcaccagccgcgcctgtggcagatgcggcctataaaatcaacggccatgatcttaatcaatacgcgctcacttcactaggcttcatccccatcatttccgggattctttggttaacacaaaaagctcaagaatacctgccagatagctggtacaagaatgctgagcatgccatcacgggcttagcggtttaccttattatcggtctgacacttattattctcattctaggtttcctgatctcctatttgaatattattcaaaaatactaccacttcactttggaccgaaccggtgacgaactacgaaccagccgcggcttttttcaaaccaatacggtcagtgcccgactgtcacgcttgcaggcggttcgctttaagcagagcattttgcggcaatggctgcatcttagcaccgttcaggcgttattagcctcaagcgccgctgatgaccagcagaataatgatctggtcctgatgccggttatcccagaacggcaagcactcagcagcatgcgggcattcgtcagctggttgccggaaacatcaccgaaactacagccaattccagttagcaaccgctggtactacatgcgcaacatggtcctaggtcatctgacactactggtgttgccggttgtgctcgcaagtgtgttttggttgcacgtcagttggtggctgtggctggtactggctggcttgatttggttagtcgtcatggcgttgcaaggtcaatatgcggcaaccacagccgccattgctattgcgccacctaagcaacttatcattcaagtcggtgaaatgtggacaaggcaacgttattttgtccgtaaaaaagacattcaagccatgacgatcaaacaatctatctggatgaaggcgcgtggcgttgcccatttagaggtgcatattcgcaaaggcaacagcgatcagacagtcaactcccgctatatggctgttgatttggccaagcagattatgacttggtatcagccattaccatcagtgccgcaagaaggagacaatcatgctgcttaatcgtatccagtacaccccaccaaaatcaaaaaccgcgtatccattcaacttgccttggcaagcttcctttcgtgacctgacattgtcgcaacccgtcacgattttgacaggcgacaatggtagtggcaagtctactttgctgaatgctattgctgctaattacaatgcaatcctcatgagcggggcttcccttgatgaggacccggaatatcaaaatagccgtgccttagcccgttgtctcaagttgacttggcaatatcggacgaaggcaggctttttctttcgggcagacgattttatctcattcattcgcgcaacccgtggccggatcaaatacgcgcagacacagcttgagcaactggcacccgatagtttggaacgcttgccttatctcaatacactcagtgccattcaccatctttatcaagttgatctcgacaagctttcccatggtcaggcgttccttgctttatttcgtgctcgactgcgtccaaatgcactttacctgctagatgaaccagaatcaccgctcacgccggaaaatcagctcagtctattagccttattacatgatgcggtagaaaatggctcgcagtttatcattagtacacattcgccgattctcatggcctatccgaatgcgcaactactggcgttgggtgacacactagcacccactcagtatgatcaaatcgaacatgtcgcttttctacgtcactttttagatgatccgcaacgatttatttatcacctgttaaacgactgacccgttgcaatcacgcacctagctgttctaaggtgggggcgagcgatctccagcgcgggtaactacgctggagatcgcgttaatgaggaggaataatatgctgacttcatcttggatcaaacaattaccgctgaccgccatcacgcaagtcaccccggttggtggcggtgacgtcaatcaggcataccggatcgatacggcgacaaagccttactttttgctggttcaaccgggttatcctgctgacttttatgctggcgaaatagctggcttaaaagcatttgacgaggcacaaatcttagcaccgcgtgtcattgctaatggtcaaattgaaggcgatggttttctgctactcagtttccttaccagcggcaatgggtcgcaacgcgatttagggcgattagtcgcgcatttgcatcaacatcatgaaccaaacggccgattcggctttgactacccttatgcgggcaccagcgtctcatttaccaacacctggaccgattcatgggcagctctattcattcaccaacgcttggacaaactcgccgcacacctgcttaaaaaggggctgtggcaagccgacgacgaagcgaccttccaacaggtgcgcaccatcatcagcaaaacactggcccatcatcacagcgatgcttccctgctgcacggtgacttatggggtggcaactacatgtttactgccgatggtcagccagctctgattgatcctgcagcagtatatggtgatcgcgaactcgatatcggggtaacgacagtttttggcggattcacccaagacttttacactggctatcaagaagtctacccacttgatgctggttatcacttccgccttgacttttaccggctgtattatctgatggttcatcttgataagttcggcatgggttacgctggcagtgtggcagcagtgatgaatcaaattctcgatcatggcttagctgaataaatcgcttcgctatgtattttcgaaacgaaaactatttcccaggaaattaaaacagcaaaacggccaacccactagttgatggattggccgttttgctatcttctaaaaatcaatatttaagcgttcagcaccttgttcaggaagctcttggtccgttcttcctttggatgctcgaaaatgtcttcaggcgtgccttgttcaagaatagtgccattgtcaaagaagacaacccgatcagccacttctttggcgaagcccatttcatgagtcacgatgaccatcgtcatgccttgcttggccagccgccgcataacacctagcacatcgccgaccatttctggatccaacgcactggtcggttcatcaaacagcatgatatcaggatgcatcgccaacgcccgcgcaatcgccacacgttgctgttgcccaccagaaagctgagctggcatcgcatctgccttgtccgtcaaaccaacaacttccaacatggcttttgcctgcttgatggcttcctccttgctggcgattcccagctcggttggcgccaaggtcacattacccatcaccgacatgttcgggaacagattaaaatgctggaacaccatcccgattttttcacgaactttgttgatgttggtgcctttatgggcaatatcttcaccatcaatcaagatctcaccgcttgtgacggtttcaagaccgttgatcatgcgcaggacggtacttttccccgcaccggatgccccgatcataacgaccacttcattgttcgccacattcagattgacacccttgaccacatcattgtcaccgtaactcttgtgcacatttttcatttcaacgcgataatcgctcatgccttcaccttcttctgaacccagttactcagccaggtcaataacgtaataataatcaagtaaatcaaggcgaccatcgtccagatcttgaacccttccatgttgcgggcaatgatgatcttcccggtttgggtcagttccagcaagccgatgatcgacaggattgaggtatccttcaatgtaataataaattggttgatgaaacttggaatcatgattttgattccttgcggcaaaataaccttccgcatcgctttaccaaatggcagacctagacttcgcgccgcttccatctggcccggatcaaccgcctgaataccgcccttgacgaaggccgctgtgtacgccccttcgttcaaggtcaaagttacgatcccagcaatgaatgctggtacttttgatccaatcaggcttggcaccccgttatagataaacagagccaaaaccatcagtggaagaccgcggaaaatgtaaatgaaggtcgtcgcgaccccttgtgcaaatttatttggcaagacgcctaacaatccaacaagaatcccaaccaaggtagcgaagaaaatggcgacaactgtgagaaccattgtctcttccaggccgctcattaaggtgccccagttagccttcaacaaaccgaagaaagaacgatcagttgtttgcgcattgccagcggcagttttttgggactttgcactgccgttgccaagataacgttcaatgatcttatcgtattggccgtttgcccgaagtttcttcaagccagcgttaaacttcgtgatgagcgcccgattattcttcgaagctgcgaagccgtatgaaccttcacgggctggcttaccgataattttcaaggccatgccattgttgatcccgtactgcatcaccggttgatcttcaaaacaagcagctgaattacctgtgatgacgtcctgatacatattgttcgaatcatcaaatgtcaccgttgaaaaaccgtatttgtttttaatactgttggcataatccgcagaatcagtcccggtcttaaccgcaactcgcttaccgcgcaaatcttttagcgacttgatagtccctttttttgccaccgccatgaccacgcctgatttgtagtaaggatcactcatcaaaaacttttgttgccgctcaggtgtaatcgacatgccagcaatgacaccatcgatttgcttagcttcaagtgcctgaaccgccgcattgaatcccagcggcttgatctcaactttaaaaccttccgttttggcaattgccttaatgagatcaaggtcaataccgacgtacttgttatcctggttcgcaaactcaaacggtgcaaaggtcacatccgtcccgattgtatatgttttttgtgccgctgccactgacttgccgggtaataaagctcccagcattaaaggcagggcgattagcagccctagcagccattttcgtttcaaccctaacaccacgctttctatgatatccgattgcaaactcgtttagcttgcaacaaatgcgctttctgcccacgatcaggctgacttaagcgaccttaattaaaaaaactactttttatgctagcggaaagcaacagtcgctgtccagtcctgatgttagattaattgacatttgtcacattattttacgccaacggtctaggcctccatacgccgttgaacccaattactgagccaagttaatagcgtaataatgatcaagtaaatcaaagcaaccatggtccaaatcttaaagccttccatgttgcgcgcaatgataattttcccagtttgggtcaattcaagaataccaatgattgagagaatggacgtatctttaagggtaataatgaattggttgatgaagctcggaatcataattttgatcccttgtggcaaaatcacgcgccgcatcgcttttccaaaaggcaatcccagactgcgtgcggcttccatttgaccatcatcaaccgcctgaatcccacctttgacgaaggccgcggtgtacgcaccttcgtttaaggtcaaggtgatgatcccagccacgaatgccggaatttttgaaccgattagacttggcacgcctgtgtaaatgaataaggccaataccagcagcggcaatccgcggaaaatgtagataaatgtcgtggctacaccgcgagcaaactgatttggcaaaacgccaagcaagcccacaagaatcccgacaacggttgcgaagaagatcgcgacaatcgtcacaatcatggtttctttcaagccacccatcaaggttccccagttttcgcgcaataatccgagaaaactgcgatcactatcttgagtcttggcactggtttgtttttgggcggcttgtgtgccattgcctaaatacttggcaacgattttggcatatgtaccgtcagctttgacctttttgagtccggcattgaatcgttgatcaagatgatcgctacgatccttttgtgttgcaaaaccgtaataactggccttactttctggaccagccagcttgagcttcaaccctgtggcgatggcatattgcagaaccggtttatcatcaaaacaagcgaccgaattgccagtgatgacgtcctgatacatattgttggaatcatcgaaggtcaccgtggtaaaaccatactttgccttcaaacttaaagcatagtctgcggctgccgtcccagttttcaaggccacacgtttgccgcgtaaatccttcaaacttttgacttcgctattttgccccacggccatggcaaccgccgttttgtaataaggatcactcatggcaaacttttgctgccgctcaggagtaatctgcataccagcaatgacaccatcaatctgattagcttccaaggcctgcacagctgcattgaaccccaaaggtttgatatcaaccttgaaaccctcggcctttgcaattgcctgcatcaggtcaatatcgatcccgacatactgattatttttatccgcaaactcaaacggggcatacgtgacatctgtgccgatcacataagttttctcggccgcctgcgttgacaccggtgagcctagcacgaccgccagcatcaacgccatgaccccagcaacgcaccacttccaaactcgtctcatgaaaacaccatctttctcatttagttcctgtttctttcaaaaactgctaatgacgcatgctacttcaattcatgtgttttgagacctgtaaacccagctcccattcacagcttacaagtgtaccgatttttctaaaggttgtctacgcgcaagaaaagcaagattgctttatactaagagaaacttaaagaaaaatgtggtgaccttatgtttagctacctaatcgactatgatttgaaactttccctaccgcgaccggaaatcgacggtccccttttattcgaacaaattgagactagccgcgattcgttggctgcctacttgccttgggtcgcaacgacactgactgccgacgacgaaatcaactttttaaatacaacactcaagctttttggtgcaaggactgccttgcatctgaccatttaccaagccgatgctccagttggcatgatcagtttgaacacgattgacaccttggttcgccataaagccgacattggttactggctaaccattcccgaacgcggcaaaggcattatgcacaaatccattgaagcactggccgatattgccttccacgattacgacctaaataagctaaccatcaatgccgctgtggcaaatcgcgcgagcaatgccgttgccgaaaaagccggctttcatctcgatggcactttgcgtcaagacgatcaacgagctgacggcaccttcttagatgtgaatacttattcgctgttgcgttcggagtgggcttaattgtttcatgcgaaacaattgtcacctccatctcaccacgccatatgaaaaccccgcttgcaaaatcagcatgcggggtttatttttgcgccctatttctaattaggtcaatgtacaagcagtcgcagcaacgctggcgtcacaaagccttcgattaaggcagcaacggcaatcatcggaatgatgatgcaaacatactgtagtgcaatagccttcacatctaacgacgactttcgataatatggatcggcaaaaaaacgcttgattgactggcgaagggccttgttgacttgagcagcgagcgcgacgccgataatcaaagcactcatctccagaataccatgtggcaaaatgcctaagacaaacgctgccaaagctccaccgatacccagcttagcggcataaatgcctagcaccaagccgacagaagcacaggtgagataatacgaaatccagtatagaaaaggaatcggaatcataccaatgatcatgaggccaaaggcaacgcgttcgttattcactaaaatggcccaaaatgcactgagactgtcgtgagtattagcaaacttgccagagaggccagtaaaaataccacgaacaaaattggggttcgcgcccatgaccagatatgtcaccagaccaacaaaaatggtgacaccaaagaaaatgagccaaccgatcaatagataatggccaataacattcaaattgtatccaagccgtttcttcataggttgcccctctttcctaataacagatgctagggtaagtatactccagggtggaaagggtggctattttgagggtttggcggtatgtatcatttttctcctaatcaggccttctcctattatccaagctgagtgtccatcagttctcactagccgttacttatccaacatcgtgccacgaactgggacgtttggcgtcgcctattttcttgttctgccttagcactaaaattgaaatgacgctctgaataaatgcctttataaactataaacagcgtttcacatctttcgccatgccagccgtcagttcgcatgcttgctgtttagctttttttcgtgaataatgacggcatggaggtgtcatgatggaagtcaatgaagcacaagccatttttgatgcagcacgggatcaagtagcgacgattgtggtgggcaaatcaatgccgatcacattgactttcaccgccttacttgcaggtggtcatgtgttgttcgaggatattcccggtgttgggaaaaccaccctcgttcaagcgatggcaaaaaccttagcggtgccattttcacgcattcaattcacacctgatatgctgccaagtgatgttcttggcacatcaatctttaatcgggccactaatcaattcgaatttcaaaaaggacctatttttaccagtattttattagcagatgaaatcaatcgcgccacgccacgaacacaggccgccttgttagaagccatgggtgaaggacgggttacaacggatggtcatacctatcagctagcccctgacttttttgtcatggcaactgagaacccgactgattatgcagggacttacccgctccctgaagcacagttggaccggttcatgcttcgcctctcacttggctacccagatgctgacgcggaaaaaagtttgctgctatcgcctgatcgtaaaacgatgattgctcaattagcacctagactagacgcatcgttactagctgaagccaaaaaactcgtggctaacgtgacggtcagcgatgcaatcgccagttacgttctcgcgctagtacaggcaacccgacacgacaaccgtgttcggctaggtatcagcccgcgtggtggcattgccttggtcactgccgccaaagccttcgctacgcttaacggacgtacttacgttgatccaagcgatattcaaacgctactcgatcctgtttttggtcatcggctcattgccaaagatccgacacttccgacggcaacgatcttagcagatattctgcaaaacaccgccgttccgattcgggggtgagcacatgaactggcgcaacttttttatcaatgctggcattttgcttgtgctcagcctgctgatcgtttttggcgtggcatttaactcatctaccagctggtttgccagtgactttgctatcctgatactactacttgcgataccgctattgtggccattgaaaaatacactgcgtttcacagcagataatcctgacatgatcgccgatagaccggtaacgcgccttttcacgctgactcatggcagatggctacctaatcttttcctgcttgacagtgccaaaacacatacatggcatttgccaatcggacaacggacagccaaaatcagtttaaccttacagcgcggcatttatgagcagttaccgatgaccgtcaccgtgactgatttattcggctggtttcgtaaaacactacccttgcgtttagccacaccgatcactgttggccccgcacgcagaccagaagctgccgcacgaattgcagatgacttttcgcaaaaaatgtctgctgatgacgttggcttgcccagtgaccgcattaaaaatttccgcgattatttcccgggtgataatattcaacaaatcgcttggaaagtcagtgcacatgccgatacgctgattgttcatgacgatgagcatgaaggtcaggccagctggacattgctgttgctaatcacaccaacgctgtcactcgagcctgccttgagcttattcgcaagtctcatggacacaggcatcttcagcgggaacggttatctgctagacggtcggttaacctccgtcatacaaggacggcaaaacacatcgctagccaactttgagcctgacggtaccgccacgcctgattctttagctgctttgaccaccccacaacatcagcatcgcgcctatcttattttaactgctgatacacaggccgcagtgcctttcacacatgcactggctccggctgctacaacactagtcgacttgtctggaggtgatgaccatgcctaaatggctacaacgtctccttaccattttgctgacatggtggttattggcgctttttgtacagcctttctcggtgattaatccgatagcacatcctcgtgaactcgcaggctatgttgtcatcatcagcttaattagttatcttgccgcattatggccacgggcttggccaatttggctaaccactgctttcttgagcatgatcgttggcctttgggcaatactgccgcttaaacagcattttggtcttacttggtttaacacttatgtccaaaccttcaataccgcgactaggcggtttttgcaagttggtggcgtggatgtccctgcgaccctcagcatgacgttgattgtagctcttgtcgcctttctactattaataaccgttgttctccaactttatcctggcgcagtggccattgtgctcagttatttgcttgctgtacatgttttcaatggcagcgacctgacgacacaatttttccagctcgctgttgttaccgggttgttggctgttttgcacctttatcacacccgctggcgagcgtttttaattggcagtcttagtattgttggcttaacccttggactcatgtggctcagcaccagcactccgttgaatgactggttaacgaatatctctgttcctgcgcgcgaacgactcaatcagcgaggcttctatgccagtcttgaagcttacgctaacggctcaggccgcacaggattcaccgaaaacagtcgtgttttaggcggtccggtatatgatgatcccacaccagtattcaccgccaccagtcgtgaagctcattattatcgcgtcgaggttgactccttttatacaggaacgggttggcgaccatctacatttcagacgcaagctgctcctttagacggtgctattatgcgtgatccatcggctcgagtcgattatggtcaagcaacgtcagtgaaactagtttttaacggcggtaaaacctttttgccattaccatatgggcaattaacttttactggcggtaaaccagaccccacgaccgattttttgcttaactcagccacacaaaggataactgcgagcgatgatcaacgcttcgaacgcctcgatattcaggtgcagcaaaaacagtttaccgatacgcaactcgaaactgctacgagttcaactcagttaatttcatctagttatttacggcttcctagttcactaccgcaacgagttagaacactggcaaaaagaatcacagctgatgccaaaacaccttatgaaaaagtcatcgccattcaaacttacttgcgctcagatccgcgcttcacctattcaaaaacagatgcacagcaaacaccggcaaatcgtgactacgttgattactttctgttcgattcacctattggttactgtgataatttttccagtgctatggttgtcctatgccgcagcattaacctgccagcacgatgggcaaaaggatttaatactggcacttttgaaggcggaagtggcgcgaacaaacaatacatcattcccaatagcaatgcacactcttggccggaaatttatttcaacaatttaggctgggttcccttcgaaccaacaccaggattcagcaatccggccacccctgatgatcctgtaatgccttccgcggcaagcaatacagcctcacaatcagccagcagttcagcagtcagctcagcagtatcttcgtcagaatcgcgttccattgtgagcgcctcatctactcaaccgaaaccgtcttctcgatcgtctctcggcagctttcattggacagctatcatcgttttgactgtcgtcttgactttatgcattgtcttaatctggcaactaccagcgctggtggcgttcaccattagtttcaatttgacacagagaaactttccccgccgttatcgtttgttactttggtcattacggcgcgtgacacgacgccagtcaagtcaaccattgacagtctatgcacaccgcattgatacacgattaggcgatcaacgacacttcaccacgctcacgcatgcctacgaagcttggacatttggacatgtcgcaattcatcctgatccgctcacaacatccctaaaatccttgagcacgcagctagcccaatacgcacgacgcaaattccacgtgaaacaaaattaactttacgcaataatcgttccacatgaaacacagcagcatttctgctgtgttttttgagtgtttaacaaaaatactcggtttttacataccactaatgccggtactatttccaaaaaagtttcccttactttcctagaaattctcgttaaattattcatccctattcattgtcataagcaccgcctgaaggtttcacatgaaacataacacctattattcatggaaatgtcacaattcattcttttccggctcgtctaccctgtgagaaccttgctataccaacatttaacagaaaatccttgcacttactaataaaaagcgagtatgataatacaaacagtttctgagtagaccttagaaattgtttggcccctgctgctattcttttagcagccgtgccttttcgactggactctgcagttagatcgtgacgtactcagaagaaaggggggagccgctgactttagcggcgaacacttatgaaagttatgatcgtacttgaaaacatcgtcatggacggtgttaaacgcgcatcaactgttttaggaaatgatctcgttaaacactatgatgtcagtttctatagtttagcagatgcccctgcatattttgaattggacgccccgctgcttattgccccgcgtccgacagatcccaagttgcttaacttctttgggagcgacccatatacacattatcgtgatcaaatcaatgacttgattatgacgatccgtgaccagcattttcaggctgtgattttgcctgctggtttgacgaccagcttcgcaccgctcatcaagcaggcattaccagatgtcaatctgattggctggatgcacaataactacgcaacgtacatggaagattactatgttcaaatgcaagctgagtttgaaggcggcttgcaagctgttgataccttggtcaccctcactgaaagtgacctaaattcttacaagcgtttcaatccgaacacggttaaaatttacaatcccctcacccttaaccccactggtgaggcaaatctcgacgcacaccggatcgccttcactggaagaatcgcaattgcccacaaaggtatcgacttcttactcgaagccgccgcatctttaccagatgactggcaaattgcgattgccggctcaggcactgatgaagatatgaaaaatttctacgatttgattgactatttccatgtggccgacaagttaatctaccaaggcccactgaaagaccaagccttacgcgatcattatcgtaatgcttcaatcttcgtatcgacctctcgttgggaaggtatgccgttagttatcggtgaagccatggcttctggcttacctatcgtagcaatggaaaatactggctcacgcgaatatcttggcaacaatgactacggtttactcacaaaggcacaagacgtccctgatttcgttgataatctcaaaaagatgatgtcacagccagcattacggcatcattatgcccatcaaagtctcgaacgtgccagtcactttagccccgaaaccattgtgagtcaatggatgccgattatcgaacatcaaccaacccgtgtttcagttactggttaaccaagccccgatgcaagcgcctgttgcatcggcttttttgtgagcgcgttatgatgatgcacgcacaatcccaattaaaaatcgtcccataacgactctagtttggtcatgacagccaagattcggtacaatgagcttatcttaagtatggaggctctaaccaatatggaatcaatgaagcaaagaatgcttggtggcaaactgtataaagcaaacgatccagagatcagcgttgagagtcagcgaggcagtgatctcgtctggcagtttaatcatttagcccctgataaaaaagcagaacgagctgcggttttaaaacaattatttcatgcatttggagacaataactacattgagcctcctttctacgttgactacggtgctcacacgtcaatcggtgatcatttttatgccaacacagattgtgttttcttggataccgcgccaattaccattggcaaccgggtttatttagcgcctaaagtgagtttatttacagccggccacccaattgatgccgctatccgcggtgaagatttagaatatggtaagcctatcaaaattggcgatgatgtctggattggcggcggcgtcattattaatccaggtgtgactatcggcagcgatgttgttatcggttctggatcggtggtcacaaaagacgttcctgatcatgtcatcgttgctggcaatcctgctcgcatgattcggcggattactgataaagatcatgcccagtggcaacaacaaaaagatgagttcttaacctggcagcaacaggctgatgaaagccaacaatcaaagcagtcttaactgaccattaacggagagaacaatgttcaaattaatagcaacagacatggatggcacctttttgagagacgacatgacctatgatcgcgacctttttgcgacgttacatgaaaaaatgcaagcgcaaggcattcagtgggtggtggccagtggtaatcaatactttcagctgacttccttttttgaagctttccctgatacgatttatgttgctgaaaacggcgcctacattcgcgatgctaacaaagtatatgctttaagttcttttgaaaacggtgccattcaaccaattctgactaaactaactagcatacctgatctcaaaattcttgtctgtggtcaatcaagcgcctatgccctgaaaactactgatgctgaccatatcgcaacggcacgacaatactacaagcaattacgtttagttgacactttcgacaatcttgatgatcgcattttaaaatttgccattagttgtcctccagaaaaaaccgcggctattgttgccgaaatgcgccaactgttggttggcttgggagaaccgacaagcagcggccacggcgacattgatatcattcaacccgggatgaacaaagctgccggattggcaacacttggtcggcatttaaacattcaacttgctgacatgtgcgcttttggcgatggcggcaacgatttagaaatgctacgggaagttggtcttggtgtggcgatggcaaatgcaacgccagcagtactggcagttgccgacacaaccactaagagcaatcaggaacaaggtgtcttgcagtttatgcatcatctgttatctgaaccctgaagcccttgttggaagaagccactaaaaaggaggccgcatgcatcgcaaaatcgagatgcatgcggcctctcttttgtgttccacgtgaaactcactcgaatacgcggacgtttcacgtggaactaggcttaacaaatccctacttttcagcaattgataagtctggcactgtttcttgattcgtcatgaccattggcgaaaacaatcgcgcgatcatcgcagccgacagcttatgttccgagcgcaacaagtcaggaatagcaacgtgctgcttcatgctgtgctgaatcaatctagccgtcgcctcataaccaagatacgggcttaaaactgtggcactgatagccgaatggtgaaccgcggtttcacactgctcacgattaaccgtcagcccagccacacagtttgacgttaaggttgcaatgccgcgagccaagtaccgctccccttgcaacaaatcacggaaaataatcggctcaaaagcattcagttcaagctggccggcttcggctgccatactgatcgtgacatcttggccaatcacctgaaaggcaatttgattaacgacttctggaatgacaggattgacctttcctggcataatcgatgaaccagcctgttttgctggtaaatgtaactcattaagtcccgcctgtggaccactgcttaacaagcgaagatcattggctacttttgacaagtcagtggcaagtcccttcatagcaccagagaaggccaccaaaacgtcgcagttctgcgttgcatcaataaaatcctcagctggcttcaattgcagatcaatcaattgattaacctgacgaataatatgactacggtaataaggcgacgcattcaacccagttccaatcgccgtaccgcctaagttaaccgcctgtaaatcggctgcaggccgtgtcaaccgggctaagtctcgacggaacaagctagcatatgcgtgaaaactgtgtccatatgttgtaggaacagcgtcttgcagttgcgtgcggcccactttaacaacatccgcaaactcatgtgctttagcgtccaaggttttgatcaaaaacgttaatgcttgtttcagcggtggcaatgcctgtaatgctgccatctttccggctgttggataagtatcattggtcgactggctctgattaacatcatcatttggatgaacgcgaatcgttttgagctcagcgctggccaagttggcgacgacttcattgacgttcatattcacggaagtcccagcgctaccttgaatcgcaggcgcgaccaacgcatcttgatgttcccccatcagcaagctgttgcacgcagcaacaatcgcccgcgactttcgaacatctaacgtacctgcagctgcattcacttgtgcagctgcttttttaatgatgatcagacttttgaaaagtagcggatcagtccgctctgtactgatcgggaaattcgttagcgcacgggtcgtgtgaattccatataagacatcctcatcaattgccaacttaccaatacaatcttcctcgatacgcattgtgaacttcctttcatataccaatatttactttatcagtataatcgggtaaaaacgctcgtcaacgtttgttgttaggtagtctgacaacacctatagaaagtataccaatttaaaaaatcactgtgatgaagcttaaatgcgttaaacgtattcatttaacaggtaaccgtccgccgtcacgccattgcccgatcatttgctgtgcttgacaggcgttagcaaactttgtcagccgttgacgaaataatttaggctggtgacttttgatttgaatcgtgtcacaacggactcgttgatacaaaggcggacacgactgaaaatactgccacgcacccggacgacgtttaagtgctcgaataattctgggatcaaacttgaaatgacgcgggttcatatcaggcaaaacagcatacccagctgccgtcatcttccctaagtgaatcatgcggcgacatcgttctttattcaattccgaccacgcgctccccacttttcttggtacaaagcgctgcgatgctggttgatcaggtgccaactttttgtaggtactgtcgatccagccaaaacacatggcttcttccacggcgtcaacataccaaaacatgtcatcctgtttcggtacaccacgcttaacgtctacccaacattccgaggcgtcttgatagtgagctgttaaccaactacgaaattggtggcgatttgctactgttagatgattgacgatttttctagtcaataaatctgcctcctcacataacaactttcaatggtcattttacaaaaaaaatctacgcgacgtatttatccgcgtagatttttcacctaatttattgatgctgaattgcccatcaatgtccctgatgtttttctaaacgtttcgcctgcttcttcaagcgaacctcacaagcgtgctggtctttcagttgcttgcgtcgttgctttttcacctgcaaatttcgcttgtgtgctagcttcaaaaaagttgttgcttgggtccttttagcgttacggacttcttttcgagcctgacgactacgcctttttggacttattgtcatctgtaacttggggagaataacatcctgtgcggctacccaatgtaggtcttcccatcgttgttgaattaaatgtaacaactcacttgctgtcggggcttgtgtcccaaatgtgactttagcaacacgatacgtgtctcccattgtttgttcgaacaatccgcgataaaaaggtcgttcaaaataaactgttagcttgccttgaattgtcaaactaacacctcctttaagattttcacgcaatctggacatccaaggaggaaggatactgacagcctaagccgcgtctggactaccaaccagactgtgtttttgatagcgcaatgttattgtctgactttgataaaggtcctgtcaagccaagctagtgtatgacaatatcaatgtctcttaccaagtgcatataagtccgtttagcctcactactacataggtacttagtcagctgtggactgccttgttaaccatcgataagtcactacttccgtaaaaataagcagtagtatcccaataaccagaatgaatcctttcatagatatcaattcatgtccagcatgtagcctcgtcatggtgacaaggccgcccaacaaaagcaaatgcacgggaaataatctccgatatttttttgaaaacttcatttttatgcaacaactcgtcagcttttaagatttttgctgtcaccctataggaccgacatgccaagatttcgagtcatttcttcacctcctgcagcatctagtgtaacggacgacacacatgataacgtcagaaaaaaataaacgttctgctttctatgattaacgtcaatattcaaaaaacctccccactaagttgacccttgccaaccttgtcaggaggtttccatattgcttttaagcttctgctgttgcttctgccgcgtgccggacactttccgccacgacttccgcaacatccccgtcaaaagcattaggaatgatgttggtggtcgatagctctgcatccggaatcaaacttgcgatgcccttcgccgcagcgatttgcatgtcaatggtgatcttgcgtgcgcgtgtatccaaagcgccacggaaaatgcctgggaaagcaagcacattattgatctgattagcaaagtcgctccgcccagtaccgacaatataagcacctgctgccaatgcctcatctgggaaaatttccggctctggattagccatcgcaaagataatcggcttgtcggccattgttttgatccattctggcctcaaaacatgtggcgcggatacccctacgaaaacatctgcaccttgcagcgcatcttccaacgtgccagtccgattttcatgattcgtaattttcgcaatggcggcatggtgtggcggtagttgatcggcgttcttttcagctaagataccaaccttgtcgaccaccataatatgcttgaccccagcggccaagaaacgccgggcaacagataatccagcagaaccgccaccgttgacaacgaccctgatatcgccaatatcctttccagcgactttcagtgcattgtatagcgcggcaagaaccacaatggcagttccgtgctgatcgtcatggaataccggaatatctagctcctcgatcaatcgcgcctcaatttcaaagcaacgcggcgcactgatgtcctcaaggttaattccgccaaacgttggggccactgccttaactgctgcaataatctcttcagtatcttgcgtatcaagcacaatcggaattgaatcaacttttgcaaatcgcttgaacagcgcggccttgccttccatgactggcatagcagcttcagcaccgatgtttcccaagcctaataccgctgaaccgtcactgatgactgcaaccgtgtttttcttggtcgtcaggtcataaaccaaagacttgtcttttgcaattgccgaggaaaccgcaccaactcccggtgtataagcaatactgagatcatcccgtgtctcaatcgggacctttgagacaacactgagtttgccgccaaattcttttgcctgatccagtgccagttgattaaaatctttcttttccatgattcttttcccccttgtttaaagtgcgctcccaagtcctgaaactggactggtccacgctccacctaaacgcgatcgctggccctgaaacctgcgtgtaaggaccttggtcgcaatggtcaaagcccgaccatctcgccctaggccacttactctctggtttctaaccgggccgactcacgctctatctaaacgcgatcgctggccctgaaacctgcgtgtaaggaccttggtcgcaatggtcaaagcccgaccatctcgccctaggccacttactctctggtttctaaccgggccgactcacgctctatctaattatgaaagcatccgtaaaatcgcggtcattgagataacagtgatggcaccacccaagcgtgttgcgacctgcgcaaatggcatgaggttcatgcggttcgccgtactcagaatcgccacgtcgccggtcccgcccatgccgctttgacaggctgtcacgatggccgtttcaatcggattcatattcaagaaccgagccacaaagaagccggttgaaacaaccgtcaacacaacactgatcacgacgataaaatattgccaacttagcataccaaccacatcttttagcggaatgtataagagaccaagtcccgccatcaatgggaaagtgaagttactggaaataaatttatacaattgcttagcgccacgttgcgtttctcctgggataacgttgagatatttcaaaattgcggcagcaacaatcatcagcactggtcctgggaagcctgtgatggactgaagcaacatgcccaagatgaataaagtacaggcggtcaagacgccagcgcccatcattttcaaatcaatttcgcctgtatcgtctttcatcgcatcggcgagatcatcttcggccccgtttaatcgaaccagctgcccttggcctgacaactctggccgtttttcccctaatcgattcaataaacctgaacacataatcgcgaaaaaatttccaataatcgtcgccggaataagctgagcgacaagcgcgccgctggtcgtgcctgtgatcgtgctgtatcctagagatagcggtaaaataccttcaccaataccgcctgccaatactggtgtgacgatgaagaacatcgtgtgtttccattccaaacccagtaatacgccaaccagtgtcccaacacccattgcaagaatcatgccgagcatcattggaataatcatccgcatcaatccttgaatcagaattttacggttcattcccaaaatactgccgcagacaagacaggcaatatagaaataaagaaagtttgcttgtttcatgagcatgtctgcagcttttaacacattcggattcatcgcattgtagaaaacgagaatcgaaggtaccaacagcgataaaatcgccggaccgccaaagttcttcacaatcggaatattggctccgatcgtacctaataaccaacccaacgtcagaatgaccgcaaacccgccgagcatgttaactggcagttgctgcatcacaccggcaaggacgatgaccgctgccatcacgatataaactggcaatggtacagaccctaccttgaagtccatccactttttctgcggactcgttgatttgttgggtgtaaccgtcttgttctccatgtttccttacccccaatcttttgttacttacagcatattgtaagcgcttcatcaggggaagattatttaacttattaaaccataaacccatttatttaagcgattgttttactattcacaagatggtttctctactgaacaggagtatgatcatgaaaataaaaggatggcggctatggggctggctctcattaatttttacttccaccttgttattaacggttctaactgtttatggtttgaccatgctggaaaaccgtcagcaatttgaaagccgtgaaggtcaattgttgatctcaattggccgtcagttagcaaaggatccccgtgtaaccgccgcacttgaagcaaacaaggctgattcagccacgcgcacctacgcagggactgtcgagaaaaattttgatttagattttgttgtcatcatgaatatgcaaggcattcgcctgacgcatcccgatcccaaacaaatcaatcgacattttcaaggtggtgatgaagtgactgccttgcgcggtcatgagcatgtttcggttcggcgcggaaccttgggccgctcactgcgcggattcgtcccagtgtatcgccaaggcaaagagatcggtgttgtggcactaggcattaaggtcacctcactgcaaacactcatcaagacctcgcaagatggcttccggctggcgctattcgccggtacgatcatgggcctgctgacagcgtttttagtcgcctactatattaagcatcagcttcatgaccttgagcccaaagaaattgctaggctgcttgaagaacgcaatgcaatgcttgaagaaaccaaggatcctgtcattgtgattgatttgcaccaagtcatcatgctcatcaacaaagccgctgccaagctgcaaaatcaccttataaccgaaagcgcctttattggccagccattgacgaccttgattgccaaccctgaacgtgtcaatctgaatgtcaaaaccgagcagttttatcaacaggatggccaggattatcttttctctgccgcacctattatggtgaaaaaacaaaaaataggttacgttatctttctacgaaacgctactgaagcgatctttgtcgccgatcagttggccaacaccaccgcctatgccaacgcactgcaaagccagtcacatgaattcatgaataagctgcacgtgatttacggcttggtggcaataaaacaatatgacgaattggccatctacttgcaagatttgttaaaaccagagcaagaatttgcaaatcgcttggccttgctggtcaaaaatccactcgttgccggcttcatgattggtgaacgcgaaaagtttgccgagcgtaaaacgaccctcgactttgaaatttcccccgaactaccacccaatcctaatacccaagaaaccaaaacgctgttaacattaagccgctatctacatttcgggctactgcagcacgatttgccggacaccattttgatccagctagagtacgcacagaatcgtctcacgatcgtctatcatttagacgaaccagccaaacgaacggactttatctcgcttattcatcaagactacttccaacaactgctgacggagttgaacggctcagtcaccgttagctcaaccgatccgctgacactaacattaaccgtggactaccacgaggaggctcaaaatgacgaacatcctaatcgttgaagatgatccaatggtgcaatttatccaccgcaattatttagaaaaaatcggtacttttgacaccatctactcttcagaaaccatcgccgacgccaaaaaactcttagccagccgatccatccaacttgttttacttgatatccgcctcaaagacggcaaccgcatcgattttttaaccgacctgcgccgcaccaaacaaaccgttgatgtgatcctcatcaccgcggcaaacgaggtcaacattgtcaatgatgccttgcacttaggcgtgattgactacctcatcaaaccattcacgttggaacgcttcgaaaaaagtattcaacgttacagaaccaagcatcaagcattggtaactgatcagcttaatcaaagtcaactcgacacgtatttcgaaccacaaacaactatccctccgacagtcgatctagacaaaggcctgagcaaagccacgttgcaactcattcaaggcgccattaaacaactcccgcaaccatttaccgtcgcacaattaacgacagaaaccggtctctcgcatgtttctgtccggaaatatttaagttttctagaggatcatcattttctgaaaggcgatacgatttatcgcaagacaggccgaccttataaaacttatcagatggtcacggcaccacatgcgctgtcgtaaacatcattcaaatctttaaaaaggcagtgatcttaaatactaagatcactgcctttttgttattaatgattaaggttgcttacatacaatgaacgctgatactgtatttcctaaattagataagtttcacgtggaactcctcagaaaattaagacctacatttggttccacgtgaaactcgctgccactttccacaaaaaccggttcacacacccgttaaagatgtctgaaacagtccattggcaccgtttctcctattttttcgacgcttcaggcaaagccgtatttttgttcgtgatatcaataaactgtgcttcacctgctactgaatcaacggctttttgtagacgacgcatggcggcgcttgcaattggcaaatctacaaagtccttggtcgcattgtctagttcgacttcatcggctacggaatcttttagcggccgcggattgctttcatctaaagcgcggattacaactggcttcaatggacccatctggagcaagtcgagtgttgtttggtagtcaatatcataggcatcggctaagtcaagtgtctcacgaatgccggcctctgctgccatgatggcaacattcgtgatcaatttcagttttgcaccatttccctgctcaccgacatattttacagtgccaaacgttttcaagataggtgtaacatcagcaaccgcctgtttgtcgccagcggcaatcagaaccaagccagcttcacgtgcatacttcacgccaccaatcattggcacatctagtagatgggtcttggtcggcatgacggcttgaatcgcagtaatcttacgcgggtccaaagtcgaagtcacaatcagcgtactccccgtctgcaaataatgcacaatacccggagtttcagtggtcccaatatgaagtgctggcacatcgtctgacatgaccgatgtgataatgaccttggacgctgtcacagcatcttccagtgaagttgccgtgcgaacgtgatcgcccactactgccgccatcttggcgggcactttatcccaaactgtgacgtcatagccagccttggccaaatgtggcaccatatgactgcccatatcgccaacaccaataaatgttattttcatgttcttcttccttcccgatcgaaaatattcacctaggcaatagatacttaaaaaacaagtctttttcttgaagaagcatttgatcaagaaattcattgccagctaaattcgattaaaacaggatcaataacacctgtaaccattaacttagcatgattgaaaagcgatttcaataacacagctcggcacgagtcattgtcgtcttttttccctccgccttacctgtttgatgccaacaaaaagtgttcctaataggtttacagtactaattttttccatttacgaattttcggtcgaaaatttgtaaacggcgcaacactattgatgtgaatccacttccataacggccattgcgccttggtcgtagcccacctccgaacgcctgcatcgaaaagctccgattgtgataacgtctcgatccaagtacacaactccttgaccagcagatcaagcgcagcaagttggtcttgaaggctttgttgaccatactgctcataaaaagattgatacaaaccacctaggttattccatttatagcccggtgcgggcgtttcaacctcaataccagcaacctcatcacgatcccagctcagcaacaagttgagccaacccaattggtatgacagcatttctgacggtgtcttatcaaccccttcaaccagcaactcgcgcttgtcttcggggatatcggtaaattccgccctaaatttcgcatagcgctcttcgatcgtgtccagcaaggcttgtttatcggcgtatgttttcaacttgatcagctcctttagctaaagcgtaccaagtcacgtcgaaggttgctactcttttaggataataagaagcctttcattctctttatcaaagagcaacaggcactgattcaagaaccttattctagtgcctttccagaaactcgtgtcaaactcaccgtcaacacattatcggccgttgtattgtaatcagccaacatgcccttcacgatccctcgcgatgggccatgcgtgctggtcgtttcctcgtaattttgaatccatgtgctgactgcattaaatccgaattcgaatccttcaaaaacctgcatgtaaaccgaggagcgtggatttgttgtcacaattgtgattttcaaaacccggccgtcagcgatctgcatggttagcctgatcaacccatcatcgatgaaagtgacgtcgccatctgcggcagtctgcggaagtttatacgccgccagtcgcatgttttcgttataaacccgttgtacgtaatcgtaactgcccaagtctctttgcattcttattcaaaacctttctgttaaaatatggcttatcatttggtgtttgcgaatacacatcaacctttcaaattgacgtgtggtagcttccacagtgtaccgtttagtgccagaaataagaattaattagctcacccgttccttgcctaacgactaaaacactcactaaagcaatgaaggaatgactacgatgcgaaaaccatccgggcgtcaccgcggtacgaacaaaaccttatcctttgcaagtgtcattctgcttgggatcaatggcatcattggatccggtatctttttgttgccaggcacactgtatcaagaagctggcttgggtagtgtcagcgcgattgttttggctggactcagtacaacgttaattgcactgagttacgctatgctcgcctctaaaatagacgatgatggcggtgcgtgggtctattcaaatcgcgcttttggcgcttttgtcggctttcaaacaggttggtttggatggtttctgggcgtgattaccattgcggctgaattggccgcttttctcactgcattgggcggattaatacccgttgtcaagcaacgaaacgtctatattagcgtggccttagtgatcattgctgctttaatcgccattaatttaatcggaccaaatatcctcacgttcatcgataatatctccagcgccttgaagatcatcattctcatcgcggtgattgctgccggtggctatttcatcagtacacacggcctgcacgtacgccagccgcaagcagtttcatcagattttcgcacagctttctcgacagcattctatatgtttaccggcttttcattcctgccagttgccgcgaacaaaatgaaaaatccagaaaaaacactcccacgcgccctcatggtggtcatgttgatcgttattgccatctatggcatggctcaaatgacgacgatcgttattctcagcaccaatctgactgctgaaaccttaccagtcgcggcagcgttcgccgcagttgttggtaccatcggaaaaacggtggtgatattaggtatgctcatctccattctgggtgttgctgtcgccgtttctttcgatacgccaatcgaaatggcttcattagcaaccgaaaaaactttgctaccagcagtattcgggcgaaccaacaaaagtggtgccccatttgtcgctatctggttgacaatcggtattgccgcattgctagtggtatctggcagctacctatttttagtcaacctgatcgtatttagtgcctttcttcaatacatcacgaccatcctagcatggttcaaattacggcatgatccaaccctacccgctggtattcacctaccaatggcgccacttttaatgggatttgccttattgctgatcggctatctaatgaccagtgcgacatggctgacttggctgattgccgtgatcgttgcattgatcggcagcgtcatctacgccaccgacacccgcagacgaggtgaatgacgcagcttgctggtttgtaaaagtcacaaaaataaccggctgaaagctctgccggttattttaacaacatgttgttatcgttaccgattaatggacctcgccattctctgtatggtgtgccgctcgccacggatcgccttgctgactgcgtataagttatcgacaggtgattcgaatccccatgcagaatcgcccacatgctgcatatcaacgccacagattttatttcgaatcgccatctcctgcaacacatgactgccgctgccttcttgactcgtgccaatcgcactcatcaccaaaccacccaagcgatgaacaactttcacaaccgccttcaagtcagcttcatcaaatcccggaattgatccaaccgccggcgccaaaatcacatctgcacctgcttcaataaactttttcgccgtctcttccgtcatgagcggttcgtcaacaccagaagcatgcattttccctgcaataattaggccggtaaaatacttcttggctaacgcaatactgcgaatggtcgcttcatttgtaacgccagtacccggattaccggtcagcaccatgaactgaaaacccatttcttcggcttttttgatgaccgcctcactggcagtgcatcctggcaaaatggcaatttgattttccatcattttgggattgtcgccaatcggttcaatattaattccaattggtcggccaaccagttttcgcagtctcgtgatgctctctttgccgtcatgcttaggcgcgctgtataaatctctttcaccaggatataggccaaaaattttgggatcatcaacatcaaggcgattgcaaagaatcatatcagcgccaaatgctgcagcaatttcggctgtggtaatactgtccaaattctcttgcgtcacgatattttcgctaacgataatccgcccttcgctagccttgatgctttccttaagctgctgcccatcaaacgtcatgacctcgcttgtactggcacttagtagtcgtttcaccattttgttcattgcctcctattggttgtcttttaattaatagtagcaccttgcttattgaatcatgctacttctgctgctgcctttcttaaataagatttgaatggactgctttttaaactggtcgaaatcgaccagtttaaaacacgaactttgttagaataccgaagaacgacaaaaaagcccgaaaacgcttaaacttcaacgttttcggaccaaatgtctttatattctgggtggtcaggggaaacgtaactgtttcacatgaaatgccttaaccatgcaccctagagccgttatcaaccagtcttaaaacccccgtggttttctctgtggttttctaattcaattttgcatatattttgcaagtgcagcggtggcctctgattcctgctttgcactgacgtgagcatacacaccaagcgtaatagtcggatctgtgtgccctaccagcttttgtactgacgtaacaggaacaccagcaatcagtaaattagatataaagctatgcctgaacccgtgaatggttattctgggtgtaagtccattgtcatcttgcagcttatgcagtcgcttagacggtgtgtttaatgactgatacccgtttttagtattagtgaaaagtaactgattcggttgcatcgtattaatacctagctgtatgaatgtttcctgctgtattctacgccaccgtttcaagtatgccatcgtttgaccgtctaccggaatggttctccgtccagcacgtgtctttggtgcctgaacgatctgatggcctttatcaccttgcgttagtgttttgttcactttaatactgttttctttaaagcttacatcattccacgtcaacgctaatagttcaccgcgacgaacgcctgtaaaggctaaaactctaaacataatgaagatatcgaagtggttcgcttggtcgatacaggcaaagaagtgattcatttgttccttagtccaaaagttctccggcttatcaccagccagatcgtcatggtgcggtaaaacaacggctttggcggggttcttatccatatacccttgtcgaactgcatagtccataaccgatgaaacatagttataccaccgcttatagttagcagacgtgaattcaaaccacctcttaacagccttctgcacgtccttagtggttatcgtggcaattcgcttaccgccaaatgccggtaggatgtgattattgaacatcccagcagttcgtgcccatgtggactctcttaccgtattaatgtagtttccataccactcctcatatacatccgaaagaacacgggctttggtttctctttttctaagtcaccgttgctgattgctagttcaagtctagctgctgcaacagtggcttctttttttgtcttaaaccctcgccgcaccttgtacttcttgtggccagtctgtggatcattaccagcaaagacctgaacgcgccagaactctttgccgtctttcgttgcgtactttttaattgatgccatttgctttctcctatccgtcacgctgggcaggcggtgttagattggagagttttactcaaattcgagtaaaaggtggcggctgatttttcagccatgatattagatatagaaattaagcgtgttttgccgttactgcatctagaagctgttcaaaagaactcatgaattcagacttgacgtagtcgacttgtccatcgttcttaacgattgaacgtaatccacttaacaaagcaccaaatgatgctgacagacccctatccgaatgaaaaccattgtagaaagcagtacagagatgaattgcatcattgatggtcagcatctcaaaagtatccatcttttctaaatcgaggttttcaatactattaactaactgattcatggcgcgcaggcgcatttggttcagggattcagtggtgctcatggactttttgatagcagataatactttttctgcatcttctggagttttatttccatgtttatagtcatcaataatttcttttagttctcgattagtcatcgtatgtgcgatggtttcatcaattgcgattggatcactcgatatcccttggagatatggtattgaaacggataaagcatctgacaaagatttccaaacatccatgcgcggttctctaagaccgcgttcgtatgcgctaatagtttgccgtgtaaccttgagctgtgcggccaagtcgccttggctaagatgagcagcttcacgtgctgccttaattcgattattggtcataaattttcatctcctcaaggccagcatagcggattttagaataagtagcaacggtaatttaacttttttacagattgacgcttgcaaagttaacaatacgatgctaagattgcatatgttaacaaagtgatgctaacagtaaaatcatatgaatgaggtgaaacacaatgcaactacagattagcactacaccagagtttgagaacaagcttcggtcgctcgtacgtcaaaccgttgcagagatgatgccacagcagcagaccatccagccacagattccagaattcttgaatcttggtgaggcatgcaagcttttgtctgtcagccgcggcacactcgacaagctcatcaagcgtggcgaaatcaaggtaacgcatgtaaatactgccaagcgcatcagcaagaagcagttgatcgagttcatggcatcaagggaagtctaatcacgctgggcaggcggaaaattgtaagcaacttatgacaggcgcataaagccagagaggaaacattatgaatttgtttagtaaagacgagatagcactagatcacgagcttggaaatttgattgacgacattcagcttaacgttcatggcattgcagaagacagtactgtcacggttgatggcaagtatattcccaatagcgagttggccgttacgactgcaaaagagctgctgcgtgtatcggaaatcctaaagctgtatgaaaacgaggacgatgccgatgactagccttattacgtggatatttatccatccgacagttatccccgtcatgctgatggttttcatgaacggtggcgtgctgggagcgtttctacagtttagagaggactatgaccatggcaaaaatgataaatagcaagtatgggtggacgtggtcacagtttgtaaaggctgacgctgattgtgatcggtattgggcagctaagaaagccgaaaaacgctcactaattgaggccacaaaaaaatcgccaagagtggcacctcaaggcgagaagaagacaagcgaaaagatacagatcaacttttagcttgcctctaagtggttactttgtcaaggaaaatggaggcattaatatgaaaaatgtttcaactaccgttaataaaccattagatttgtgtgattcgctgtacgacttgcgcaaagcaaaaggggcactatctgcactatgcgatgaactagatgagttcggtatctcagtttgccatttcgataaaaatcactcgcacgacaatgccaaattggtagctttagaggctttacgagactttgatacgtgggaatgtctagtcttttgtgcccgagatattatcaccgaccagattaacgctattgactcccctgaaactgatgaggaggaaaaatgatgaaggaagattactatacaaccgcacaggcacttttgagcgatacaagtgcaatggtgaatatcttgcgacatcagatcaacgatgaacagcaatcagcactggccgacacagtcgctgacatgatcattgatgctcgtcgtctacttttggaaggagatgcggccgatggtcgacgtgcttaaagtagcgcttggttatcagcagcatggctttgcagtctatccacttgcgccagagacacgaacaccacttgctggttcgcatgggtacaaagatgccaccaaagacccagaacaagccaagaaatggtggggcgaacatcctaattacaatattggcttggggcttgatggcgtgctggtattcgatattgatatgggtcataaaagcggggctaatggcaatgagacgttggctaaattgtgcgctgatggtcgtgctggtcagattccatctacctatatagaaacaacgccaaacggtggactccatatcttcttcacctatcccaaggaattgaagctaaccagtcgatcggatttgttctctaagaatggcgaaaaaaccggcctcgactatgtcgcgactggtgtaccggttttccctagcattcgcgagaacggtatgtatcaaccacttaaagggcacaagatcaccaagctagccccagcgcctcagtggttactagatgaaattcaacgtcagtgccaccctaacatgagtaattattacagcagcgcagattcatggtttggacattttattaatcgtctggtagatggtacagacgaggggaaccgtaaccagtggatggcaagcatcgccggttcagtcttccgttctggcgccgatccagataactgtgccgatctcattcaaactgtcaatcagcgctacgttcggcctcccttgcctaatggcgagctagtcaaaatcatcaattcaatcagcaagcgcgaaatcgcgcgtcgaagttaggcggtgaagcatatggacagtttgaaggaagaattaaacaagtcgcctgagtttactcagctcaaagttgtttctaaaagcacattggaaccatttgacgtgaacaagtatccagatccgccagataagactgaaaaagaattcgagcgtacaacaaggaactggcgaaaaagctaccaagttggctaaaagtgtggtttcagtcagaacagaaagatgaaaacgatcccaaaagcgttatcattcatcggcacatcaaggtggacttcttagcctatggatatcacttcatgaataaaacacgagtagaaagtttccccgcattgagcgaaggtgccatttatgagcccagcaaagggacatggcgcacatttggcaagggtgagttcactaagaccaccgagagccgaaccaccaaagagatgctcaaatggggactgtatcgtgagagtgatattacaggcgccagacgattcttgcaacgcatcagctataacgaggactatggcaagcgatcgccatttgatgagaacccacatccagaactagttgcattcactaacggcacatacagcatattgaccaacaagatgcaggaaagtagcgctgacaattacatgctgaacgcccatgagtacgcggtcgatccagatagggacgattgcccagagactgaacgactgcttgcagctatgatgggagatgccgcgatcacatttgaggaattcatcggttatatgttctatcggtcttaccgtccattccaagcatttctatggttgtatggtaccggcggtgaaggcaaaagcacacttattcgcagaattactaacctcatcgggcgtgacaatgtatcagcatcaaaaccagcagaccttgccaatggtgaccgtcgttttgaaacagccaacctatacggcaaggaagctaatatcgtggcagacgtcgggtcagattacctcaagagcacagccgcgattaagtcactaactggcggtgactatatagcagcagagtttaaaggcattcagaactttaagtttatgaattatgccaagttgctgttcagtgcaaacgagatgcccgcattcagtgatcatagtagtggctttgctgatcgggtgaccgtgatcaaaatgattaatggtgacacccgacacacacactggtgggatcagtttgacgatgccaagatggacgaagaaacaccacgcttcgctatgaaatgcatgcatatgtttgccaaggcacttaaaagcggtggcctgacaaaacctgattcggtagtaaacgcaagccaagagtggctggacgcaaacgatcactttaaagaattccttgaccagtacgctgaaattaatctaaatgaagatcgtggtgaagtatccacggtggtgacggctgaatataaacgcttttgccaagacaacaactatatggacaaaacgacgacacaagcaatcaccaagaaacttgatgcttacggagtgaaaaaagtaaatagccgccgagggttcgacaatgacacctttggcaacaccagacgatatattggcttacgtctaaccggatcactgataaatccaagatttaactgaaaatcaaacgaatactgatatttttggtaacttcggtaacaaccatactctcccaaggctttaggccacatcgctttggtaacaggcgttaccgaacttcggtaacagccgctcaacccatacgcgctcaacgaatacagaaaatcaatttcggtaacagttgcctttaagtcttttgttaccaaaaacttcggtaacacgttaccgaaaaatattgaacttcggtaacagaaaaacgttgatatataggcgtttataagcgtttgttaccgaagtaccgaaaatttcgcgattttaccaaatatttttttacaggaggaatatcatgaagaactattcaattgcccgtctgaacaaggtggctgaaatcggtaagacagttagtcgcaggactggtgcaggtattaacatctctacatttacgccgactggtaccctgttctacggctcatataaccgcactatgacacagacctaccagatcacgggcacagacctagcggacaccatagcgatcgtaatacgccacactgacgcgatagatgacagcacacaggtaaaacttaatggcaccctgtacgcgattcagtccattgcctatgatgatgatcctaatgcgttcgatgttgtgacactcaagaagacaaccaaaggagcttagaacgatgaaactatttgaatatactgcgtaccaaggagagctaaacggtatcatcgacaagttcatgatgttacacaggtggcaagtcggattcattcgggtattctctgcaccagataatatgataaccgttcagctttactatcgcgatgataagcctgaacccgaaaaggcaggcgtattggcatgattatgaagctgtgtaaccatgctgggtgcaacaccatggtgccgtttaatcagcggtactgtgataagcaccagccagaaccacgagcgtccgacaacgaacgctatgcatatcgcaaagcaatcggtggtcgttactttaagttctacaagtccaaagcgtggcgcaagctgtcttactcgtatcgtctagcacatccactgtgtgaacgatgccaagcaaacggcttatatgtgcaagctcaagtggtagaccatcgcgttccgatacgcgtggactggagccgcagactggacgagaccaacttacaaagtctgtgtaatgcttgccacggaaccaaaacgaaagtagaagacgcggcacgctacccccacataaatacgggggctaggtcatctagttttgggaaccaagcataggagtttcgttgttgaaaatccgtgataaccgtaatatatcatgggtatttggtactatgtgttataattaagttagataaatctaattgtaattataaagaaaggacgtgatcgagatgggagcaccactgaaatctattacgcaaatgcgcggtgcaatgagtaaaaagaagctggcagaccggcgtgacatggaagaatcactattcacctatcaagaattagttgatcagccccctacatggcttgatgaatatgcagtgactgaatggcaacgtattgtaccactgctcaaaaaagacattcccgttagtgaactagatgctgccctgattgccagtcattgccaagcctattctgacattcagaaagctgccgagctgattcaagaacaaggcatgatggttgacaccgccgatagtgtgaaagctaacccagcagtcaaaatgaaacttgatgccactaatcagatgatccgcattgatgacttgcttggcttgtcagtctacagtcgggcaaagctggcagtgaagaatgagactaagaagaagcctgacgatccgttcgcggatctgatgtcatcatgaactatgcgactgaatacacagacaaggtactaagcggtgagattgttgcttgtaaaaagattaagcaagcagcgagacgttatcgcagagacttgaaagccagcaagcgcaaaaagaatccgtggccgtattactttgatgaggactttgccaacaaagccattgagtttatcgaactgatgccggcacgcgatggatcaccgctcaaactagaattatttcagaagtggtttatttcagagctgttcggctggcgtgataaggcaactggtaaccgtcgttatgatcgagcttacattagtatggctagaaagaacgggaaaagttttttgatggccgatctgggcgcgctgtatctcctcatggaaaacaagccagccatgaaccgagagattgtctacacagccaacagcaacgctcaagcacacttggcttttgatatgatgtctagtggtttgcgtcaggtctctaaggtgtctaagtcagtgcgtgatcgtttgaagatcaaccgcaccgaaatcattgacttaccgagcaacagccgagctgttccgcttgcgtctgatctgcacagcctagatggttatcaaagtgacttggctatcattgatgagttcgccttggctcgtaatgatgagattctgcgaacactcaaatcaggccagatcaacagcgacaacagtttactagccgtcatctcgaccacggggccagaccggaatggacctatgtataaagaatataaattcgtctccaaaatcttaaccggtcgcgaacaagcagatcggtattttattgccatttttgaacaggacagcaaggatgaagcctttgcaccagagacttgggaaaagtcaaatccactactggctaatgatgaaagagcaaagacgatgcgacctagcttgcaagctgatgttgatctagcagccaagcaaggaaccctgcggccaattctcgtcaagaacttcaacatgtggcaatcagccagagcagacagttacatcagtctggacgactgggagaaagccactatcaagccaccagacactatgggcaaggacgtgtacatcgggcttgacctttccaagtctagcgaccttaccagtatctcgtggttagttccagaagatggctacctatatgctgacagccattcattcgtgggaacgaagtacgggctggaagaaaagatcaagcgtgacgggttcgattacatcagcggtgccagtcgcggcgaatgtagcattactaaacttgatagcggcatgatcgactatgacgaagttttgcgtttcattatcgatctgatcgagcagaaccagtggaacgttcgagctatctgttacgatccatggtcgtttggttacttactgccagagtttgaaaagcgtgacttgccaatgattgaagtacgtcaaggtcagcgcacgctttcaataccgaccgtgcggttccgcgatgatctatttaacggcctcctaaagcacgcagacaaccaactactggcctatgcggtgaacaacgccattctgaaatacgatgccaacaacaatgcaatcattaataaggctcacaacgctacgaagattgatccattagccgctctgatgaatgcttacacaattgcaatggatcaaagcaaggaaagcgaggtagcagacaatgacttttattcgagcgatgactttagtttttaatgttcagaccgtgctattgatgctggggctaatctgtatggttgtcggtatctggtggctgttcgggtttggcgttggtatgttagcagtcggcacggctcttatctccgtcgcagtcattatcaacttcaacaaagggaggtgaaacaatgagctttttcacgaatgacacaacacaaccacgcgatgacaacagcgacccgttcttagatgcgcttgtcagcatgaccagcaacgacagcggcctatatgtggggattggtgctttacgtaattcggacgtgtttacggcggtgcgcgtgattgccagtgatcttgcaaccaatccgattgagtacagtgacaagcgtatcagcgtgcttcttaacaaggcacccaatgaccacatgaccgcatgggcattcaagtttgccctagctgctaacatgctgctgaatggtaacagctttgcacgggttaccaaaaatcctagcggacaagttactggtttcgagttagtccccaacagtcaaatggtggttaaacaagatgatacgaccggcattatcagttacgaatacacgcctgacagcggtcgttcacagcgtttaaatgccaatgaggtcttacacttcaagtgcttcacacaagacggttacaaaggactatcgccactgtatagcctccgtgatgaggttggggtacaaaagtctgggcatgcgttactgaagggattctttaacaccggtgtccaagggacaggcattcttaaagtcaacaagacccagctagacaccaaggccaaagaaaacatccggaataaatttgaagctgccaacagtggtgataatgccctcaagaccatcattctagacaatgatatggactacaagcaactcgaagttaatactgacgtgctgaatctagtcaattctagcgattggacaacgaaacagattgccaaagcgttcgggttaccactggatcggctgggtatcgaaagcgagcactcaaatgccgtacagtcgaatttgatctatctgcaaaacacactgattcagtattttacctgcttcacaagtgagatggatgctaaactttcgactggcgataatcgattcagtttcaacactgacaagctgttcagtgccgacccagcaacgatgcaagaactagcagttaaggggctgcaaggcggtgttctgaccactaatgaagcacgagcaagattaaacctgtcaccaattaccggtggtgatgagattatggtcagtctgaactacacgccactaagcaaccttgtcacttatcaagataaacagaaaggaagtgcgtctaatgaaccaagatgacgtagaaaaacgcctgaaccctgacgctgatctgactgccgctgatcctaccacagcaaccgacagccaaggccaagacgatccagacacacagcaacaggaagacaccactagcagtccaaaaaactgagtggttatgcagtagttttcaatagcccaagtaaagacctcggtggctttaaagaagtcgttgatccgcacgcattcgacaatgtggatctatcagacgtctatatggtttctaaccatgattttagccaagtcttagccagcaccaaggccggcacattgaccttaaacgtggatggtaaaggcttgcagtttgaagcaaccttacccgatacgaccacagccaatgatgcttataacaacgtccaagctggtaacctgtcagccatgagcttcactttcaatgctgcgccagacggtgacacgttcactaaggacgacagtggccaagtgatccgtaccatcaagcaagtcaagagcctgtttgacgtctcactggtagctattccagcgtatgacgataccaacgtccaagtggacaaacgcagctacactgagtggctgaaaactaatactgaacaaccagaaaaaggagataaaaccatgaccgaaaaaacaattatcgacaacaaagaacataccgaatctcgcgcttacgaagactacatccgcagcatgggtgagcaacgagacggtttaacgacaaccactgctggtgcagtcgtccctaaagaagtcatcgaagacgtctggaatctaaaggaatccgattatgacctggctaaatacgtcactgtgaagcaggtcgggaccccagttggcacctatccgatcgcccttaccaacaatggcgttttagccaccaaggcagaacttgcagacgtgccagagatcgatgcaaccctattccgtggtgttgactataaggttgctacccgtgctggcaagatctatctgtctaatgaactggtagaagacagtgaagttgatattgttgccgaggttaagaatcaactcaagaagctggtacaaaacacggacaatagcaacattatcagcgttctgactggcaagacgggcaccaacgataacttcaagcacatcacgggtactggtctcgatgacatcaagcaaaccttcaatattgagttagatccagcactgtctctgtccgtcatcgtcaatcaggacgcatttaactaccttgataccctgaaagacagcgaaggccgatacttgttacaaccttcaatcacggcaccatcaggcaagcaactgttcggggcaccagtgatcgtgattgctaacaaagtattgccgactgataaggcgggcacctatcggatcatcatcggagactttgctcaagcaatcttcttagcccaaaagaacgaagtcaacactcaatgggaacggttcgacagttatagccaaggtttggcggttgtcatccgcaacgattacgaagtggttgatccagacgctgctcgaattgttgatatcacaccggtagcagccacgccaaaagcataatttagtgggggtgtgccttagggtacgcccctatttttataaggagatgagcacatgactgtaactactaatgacattaaaaatagcctgcgtgtgcaaactaatactgatgatagtttgatcagcaactacctgacagcggcgcaagactatgttcacaatgccgttgacagcacagcggcaattgatgagttacaagcgtactcgcagtttgatattgccgtggccatgttgaccgaattctggtatcagaatcgtggagcagttaccacagcaagccaagagccaccttattcagtggttagcatgatccagcagttaagaggactgtttacggaaaacgtatagtatcaatagccaaaagattatgatataattaagacagtcctaggcgataagcgggtagatccgttttaaccgacgcacggcatagctaaccggtggcgcattttataaaccaggttactttttgcctcgctgaaatccaggcagtacagtatcatcattacactaacctctttggtcataaaaatagccagcttcttgtttagcagatcgttctgcttgggaaactgattacatgacttgtcgttttcaattggcgggcagagatgcccgtttttttgtgtgctgaaaaagttttaagcggctcaaacccacttttaatacggcgctgacagacgcgttctgacacaatttcaacgactgttccttgaggtacggtcgtggctgaactagacaacgaatatcagaaccagttactggcacaaaaatagccacctcataatgaagtggctattttgtgttagtcatgtagcttttcttgtagtttatctccagcattatcaatgcccttagctgcgaagactgtacctgcaactaaaacaccgccaacgatgagagtactagcaaccataaacttaaatgcagcttttaaagcgtccataaagatggcctcctatcagtcttttgatctgccaacaaagaaggagactacggcaacaacaataattgcgccgataattgaaggaatcaaagccattcctgccagttgtggcccccaatggcctaaaagtccctcaccaattgcagaacccactaatcctgcaatgatgttagcaaaccagcccatcgatttgcccttgctagtgatagcaccagcaattgcaccaataatagcaccaacaattaaagcccaaagaaaatgcatgataattcctcctttttggttatattgtctctatagacgaacacagtataacatacagtagcaacaataaataataaaatagccgcccataatggacggccaccgcctgccaagcagaaatgaactccgtggttttctcgtggttttcttttattgataatcaatgataaccaatgacaatctggttaaaataaaaaccagtaacgacgctgttttgacaacgtttgctactggttgataacgctattctgggtggtcaggggatcgaaccctggacccacggattaagagtccgttgctctgccagctgagctaaccacccatgctgcttatgtctgtcgcgcttcacgacttaaatataatatcatgtaccccttactggcgcaagtgttttgcaaatcttttttcaaagaatgtgacaaaaagctgactgctgcattgtgtcatcaagcggttaggcagcgatttcgtcggttactggcaatttgctgatggtcatttgacgagtggttgttcacgctcttatttcgtgataatgtgctcgcagtcgccttgcatgtaaggaccttgaagtcgaatgaccaaaacttggccatttggcttcaaggccacttacgctccggtttaaatgcgctcctgctcgcgctcacaaaaaaagacggccatcgccgccttatttcactaacttattctagaacaaaacatgaatagattgattgctgttgatcagtttgatcgccttgccaagcattggaccgaccgagatctgatctaagccgtcgaatttgtgcttaggatcgagcttaatggtatcagtgatgacgacccgcttgagtcccagatgcttgatgcgatcaacagcgccacgggagaatacgccgtgggtggctgccgcgtagacatcaagtgcacctgcttcactcagggctttgtaagagtccacgatgcgatcgccggtatcgattaggtcatcaatcacgatggcgtgcatgccggcaacgtccccgataaccccgatgtgctcttgatcgcgcttatcaacaatagcaattggcgtatgtaattcttcagccaatgcccgcgcttgtttggtaccactgtgatcaggcgcgatgacaacgacattatcgccaagatctagcttcttgaagtaatcgccgatcaagtggtgggccttgagatggtcaactgggatatcgaaaaagccttgaatctgatccgcatgaagttcaacagcaatgatccgattaacgccatccatctccagcatgttagcaacaagtttggctgtgattggctcacgggagcgcgccttgcgatcagcccgtgcgtagccataataaggaatcacgacattaatatggtgagcactcgcccgccgcaacgcatcaaccatgatcataagttccatgaagttctcattaaccggatcagagaccgactggatcacatatacatcagcgccacgaacactttccggtagttcaatttgaacttccccatcagcaaaatgattcactcgagctggcgacagcggtagcccgacctcttccgcaatcttttcagctaatggccggttcccattaagactgaataattttaattcgtgcatcgatttctccctttttcgtatttaacggtctgcaccgtcattatacgagaaaaggcaagaaattgcgactgattatccaatgcggtaaagtaataacataacatttgcagattcataagcagcgctccagcaggcggcaccccggtctccgccgtgctttgccctgactgcaagacttggaaatgggaggcatgaatcatgaaacaaagccatttgatcggccttgcaaccccactgttattatcggctggcacgttagcgaccgccgaaagcttttatcaatatgcatttcgccgcattaactatattccagacgcgcggcgttcgatgcaaaagtatgcggcttcatattatcgccatgtccactgggtagaaagtcaggccaatattgaggcatggcatatgacagccccggataatcaacgacttgaagctctttggttgccgcatcccggcagtaaaaaagcggtgattgtgggccacggttacaaaggtactgggattacgatgagcaactttgcccacatgttttacgatctaggcttcaatgtcctgctaccggatgatcgcgggcatggtgaatcggatggccaatacattagtttcggctggctggatcggctggattatttgggttggctgcaacgtatcattgatcgaatcggtgcagacagtcaactgctgttgtttggtaccagcatgggtggtgccacagtttcgttggtggcgggcgaacccagtttgcccaaacaagtgaaggctgtcattgaagactgcggctacactgatgttgaaaccgaattggcctacttactgaaaaagcagtttcacctgccaccaatgccgttggtgccactggcaagttttcttaactatcgccggttaggttatcctttacgcgttgtcaacgtccgccaagcactcacccgcaaccacttgccactattggttattcacggtgcggaagatgtctatgtgccaacgaaaatgggtaggcaaaattatgcggcttctgcgggtcctaaagccctctggatcgttccgggcgctgcgcacgcggaaagctactggatcaacccggaagcttatcaggcacacgtcaaacgttttctagatatctttttctaactgccgctttgtaaccatcacaaaaatggatcgtctgaatgatcaacaccattcaaacgatccattttaatgtctaatcaaaaacgcgcagcacagtctagaggtcgtcctcatcatctgcttcagcctcatcgcgttgtttactgagcacatcgaattgacgcaacatggccaaatttgtctcgatactttccggccattcccaatgctgaacattaaaaacgtgcttgaggtgcggaccggcgctggctggccacaacttggtcgtataggtcaccttatcggcagcaaacacttctagcaaagcctgactttgcaaatagaagctgtcattttggccgccaatcagcatgaatggcggcaacttgaggtctttggcaacttgagaaaagttaaggtggtcagccaatgcagcatcgccaccgctcagcttatcaagataaaaagcggccatatcgctcatatcaccagcggcttctggcagtttgccaggttcagcgactgggcacaccaaggccaccaaagtgaaattgaaattaacccgatcaacgccaaaaagttcttgcagctcttcgctttgctgaatgcaggccactagcgacgctagatggccgcctgccgagtcaccggtcaatagaacatgatcgagatcaaaaccgcgctgcgggccaaaatgcgacaaccaacgtaagctagcaaagatgtcttgaatctgcccgcgcacatcgacatctggcagcaagcgataccccatgcccatcacagcataaccttgactcgccaaatagcggcaataatttcggttgagattgcgatcgccataaaaccagccgccgccatgaacatcaatcacagttggcaacgtcgcattgcggcgttttgccggataatacaagttcaaggtctgctgcgggtcagcagagttttcataccggtattccgtttcccagtggacatcctctggcacccgttcatccgcatagcgtgccttatcgcgcgctgccgtctgcgcccagcctgcctgaatttttgctaaaatgtcatcatctgccattaccaagtcctccatttcaccatgttcaaatcgcattaaaagattaatcccatcttaacgcaaaaagactgccagtgagtcaactgacagtctaatcgtatgaattaaccttatctcttaacgatctttggacttaacgctagcttcgacttcatcaatcaagccagcatctttcaaaccggtcacttctttgatgacatccaccagtggctgatccttcagcatcgcttgcaacttcacagcttcggcatcattaggttcaacataatggaacatcatgccaacggtgtccatcaaaacgctgtaattcaaaccgcgttccttcaattcgcgaattgggcgaataaagcgttcgtcgtaacctagtttgcggattggtgtccgggcaactcgagaaatatcatctgagatgtacggattctggaaacgttgcaacacccgattttgatagttttcgaggtctttttcgtcaaaattcttgaactctgacaacaacaacgaacgggtttcggccagcgcaccctttgcctgattgaagactttaggatccttgatggcatcgccaattgtcgtgtagccaaggtacttgccggtgtaagccgtggtagcgtgaccagtgttgacggagaagagtttccgttcgatataaggttccaaatcgggcacatagtctacagtcttgagtttcagatccttgttcttcatctgactctcgtcaacaacccattccttgaaatcttcaacactaacggccaagggatcatcgtgcttttgttgtggcacgattcgatcaaccgcggcattagggaagccaacgtacgtatcagcaaaggtcttgccggcgtcatcgagatgctcgtagacactcttcttaagtgactgagagccaccgatcatattctcacatgcaatcacatctaatgcctgatgattgttggctgcatcacgtgcctgcaagccttgggcaattagcggtgcaatgattggcagaatcttcggaccaatggcggtggtcaccagatcagcctgcgcaattgccttcacaactgcctcgggatccttggcattgttcaacccgtcaacattgtccacatgaatcttcttctcaccgggcgctgctaaggtgatcgtatattcgccgcgttggtttaacgcattgatgatcgtctcgttaacatcgacaaaattgattttgaacccgttagcggcaagtgtttcaccgataaatccgcgaccaatattacctgcaccaaaatgtactgcttccatcataatttattcaacttccttcagtaaattgacgatttcctccggcgtttgggcgtcggcaagtttctgaacattttcaacatcactgcaataaagcgcaatttgcgacaacaatttgagatgttcgccatttaagccagcaatcccaaaaacaaccgtgaccaagttctcatcagccggatcatccgaccagtcaacaccccatggatattgcacaatcgaaatagccgtcgacttaatatatttcatcccggcctcagtgccgtggggaatagcaatgaagttacccatatacacagaaacatcgcgattccgatcaagcatcgaatcaatataagctggttcgacattaccattgtcgaccaagagttggccggcctgacgaatggcttcttccttggtctttgcttcctgaccaagtttgatcgttttaacgtctagtcctttcatcatgtcaccttcgatcaatttttttgatttcattcataaatacttctgtgatgatttgatacaactggctataatgccctttttcaaaaagttgtaaattcgttgttgacgcaatcagctttgcgctgacagcgctcaatagcgttagtgtttcctgagcaactgggttcggtgtcaaaagtagcaatacccgatgcaacatgatcgtgcccatatccatggctggaagcgacagcggcgtttttaaatcgaatgcgccgatgtaaggcactgtcacaccctgactactggtatggatcatagcgagtccggtatcgggaatcccaactggcgctaattctagtcgctttagcaaggcgtctttgacgaccgacgcttctgccaccacgtctggtaaatgtgctagcatggcatcgattgtggctcctgaggttgtcaccgcttcggtgatctctgtcacagcgaagtgctgtaacatgtcatcagctgctaacaccatggttttgagactttcaaacgccgtcacagtctgatctaatgacggttgtctttgctgggtcgcttctttcggcttgacctgttgcaataaccgtctgatttcactaatctcatcacgcgccaagattggcgtgatgacaagatactgatgcttgaatcccggcaatggcatcgtcgcaagaatcaaaccgtaatgtgccagattctggttcggcagatcactaacctgaatgatcttgatctctcgaatttccggcacctgtacacgtagcttcccagcaatcagactgccggtccccgggccatcgctcgtaatcagcaagacagctgctggcacttcggtgtgggtatggtccaagactgaagcaaagtacaacaccagatacccgagcgcatttccagtaaaggcaccgcgaccaaaaacatcgtcagccgcttgttgaactgcgtggtaaagttcaggataatcgtcgcgcagatgagccagcactggattcgtcatcgtgacgcctggcagccaatcaccgccagcggttcgttggacatgagccaacagcgatgagtaaagctgcgtattcccggaaaatttcccgggaaatgatctggcaacttcacgaatcaattcttgcacttcaaggttaaccgttaaatcaaacggatcaactggttctccagccaagccaccgcgaatggtactgagctcaacggcaagaaactgataatcgccaacgcggactttctggcgaatcgcggagtccatctccgccagaaactcgagagccaattgttggtcctggaaaagccgttcctggtcgaaatggcgttgcgcttcaacatgctgatcttctcgcaatcggcgggtattaactgctactgtcagtaacaccgctttgcgctggttgtcgctgagatccgccaacgccttgatgcgcagcaaagccgcgtttgctgccagtaactcttcctgcggtaatcgttcaacaaaataatgtgtgactggatcgaatgtctgctgaggatcacggagaaagcggaagaaaacgtacggattaatctcagcattcaacacgcctaccaatactcggcgaacatcgccttccgcaccatcaatccagataccggcagctttttggcgatttaattgcagatgatattcattcaaagcgggttcaagaatatccagatcttgcttaatggtggtgacactcacgtcaaccgctgccgctaacgccgtcattgtttccggaccgttggcattcagcaaccgtaatgttaaagcactttgtcgttgactaggatcaaatgtcaccacctgatcctgttttgccaaagtcgcggttaaggtagccaaatcattggtatccccgaccaaccgatacgtgctgccagtgcctttatcgagttttaaaccgattgtggcgatgtcactttccaattgcgaaagctcacggtaaatggtccgacggctgacacccagctgccgttccagctcatctcggctaacaccggcgggctgactcatcatgagtctgatcatttcctgttcacgattcgttagtaacatatttttcgcctcaagcggccgcaacaccgaccgaacttatttcatcttctcaataagcttatcatagttcgttgcgttcaagaggccatcaacggtgtagacctgaacattggcaaactgcaatttaacgcgacgtgctgtttctttcgaagcaataatcagcacattgtccttgtcatcaatctcgccgattgcgacattacgaactttcacgtctttattcagtttccgtaattcagcacggaatgttgcctgtgccatggttgcggaaccaatgttttgatcatgatgcaggaagtcaacttcggtaatcttatcgagatcaagttcctttaattcgtcttccggtgtttcttgtttagctttagacgtctcagttgctggcattgcctcgtcagtaccgccaactgcttcagccttcaagcttgcgatgatttcatcatacttcggactgttcaggaaattatcaaccgcaatatgagcggcatcaggtgtcttgtccttagcccgatcagctaattcttcttgtgtcacaaccagcaatcctggcttgtcttgcaggttactgattgctgtgttggtaaccgaaagatccagacctgccttctttaccttgtcgcgtaagatggaagcacccatggcactggaacccatgccggcatcgcaagcaaagataatctgcttaatgcccttggcggctgacatcacatctttagctgccgcaacattttgctgacccttagcttcagccttcatggacttcattttggcttcgctttcggctaattcgtcaccgcttgcgctcttatcgcggcgtaaaatgacagccgagatcaggaaagaaacaagtgtagcacctgtgacaccaacaattaaaccaatataattcccaatgttaaccggtgacattgcgaataatgcgaagatagaacctggggatggtgagctcttcaaaccaacattgaagatggagaaaagtgtcgtcccagtaacaccaccagccataacagacaggaacagtgctggcttcatcaaaacatatgggaaatagatttcgtgaatcccgccaaggaagtgaatgatgatggcggaaggtgcggaacctttagcagatcccttaccaaacagcgcaaatgctaacaaaacaccaaggcctggacctggatcaggttccagtaagaacaggattgacttaccatgttcggctgccgcctgaatcccaagcggtgtcaaaatcccctgattgatcgcattatttaggaacaaaatctttgcgggttcaataaagacgtttgctacccacaacaacccgtgattgataatccaatcaaccccagttgccatgccgttagtcaacgtagagataattggacccattaggaagaagccaacgattgctagcaacatcccaataatgccggcactaaagttgttgaccaacatttcaaagccttgtttgatcttatcttgaaaacggtcgtcccacttcttaatacaccagccaccaagtggacccatcaccattgcgccaataaacattggcacatcagtaccgacgatgacccccatggcagcaatcgcaccaacaacgccgccacgatgacctgccaccatcgaaccgcctgaaaaagcgatcagtaatggtaacagataagttaccattggcgaaatcatttttgcgagctgagcgtttggataccaaccacctttaaggaagatggctgtaataagaccccaagcaataaaggcaccgatgtttggcaacaccatgccagaaagcttggttccgaatgattgcataccggctttcagattaaatttctttttttctgctgccggcgtgtttgctgtttttgcacccaaggcaaacacactcctttcccttatttacaagtattattgtaaccgcttcatgtaatcgctgacaaaagcttctttggcacagttgtctgtgccaaacattcaggttgaatccccagctaacagtttactaaggaaagcatctggtttaaaaccataacagtgtacgttaactgtttcacaagttatgtaaaacgctaccgctgtctacttttttgctcgcatcatactgaggacgctgttatctgatgttgttatctactatatgtcagttgtgcctgacgccgtatcgactcagcataaacacagaaaatcaaaattttcggcattacggtatagaccactattgacatggaggttttttgatgctacattggactagaccagatagggggatatcaatgatggatgtaaaaatttttgataacgatacagaagcaggcaagtacgcatttgatttgatcaagcaaggtatggataacggtgccaaagtgcttggcttggctaccggcagcacaccagtcaccatgtacaaagcaatggttaatagtgatgttgatttcagcaacatgacttccattaacttggatgaatatgttgggttggctccagacaatgaccagagctaccgttacttcatgcagagtaacctcttcgacaaaaagccattcaaggaaacctttgttccaaacggcttggctaaggatcctgaagaagaaaccacgcgttacaacaaagtaatcgccgaccatccgatcgacatccaagtacttggcattggccgtaacggtcacattggcttcaacgaacccggttcaccatttgacgcagaaacgcgcaaagtaccgctgacccaaagcaccattgacgctaacgcccggttctttgcaagtgaagatgacgtacctcgctacgcctactccatggggatcggctcaatcttgaagagcaagaagattttgctgttagcctttggcgaaaacaaggcagatgctgtcaaaaaaatgattgaaggccctgtcaccaacgatgtgccagcgtccgcactgcaaaagcattcagatgttgttgtcatcttggacaaagcagctgcaagcaagctgagcaagaaataagctatttctttcaatcagctgagatgaaacaggccgatgctcatcggcctgttttttttatggaagtgtagctaacccagttagaaaacggcgtgtaagcagccttggctgtgataaccgggttttggtcatgaccccgcgctccttgcaagcaggtttccgggctgacaagcgtgtgaatccctttcaccccagtagtatccgttttttcctgtaagcgtttcgatttcttgccctctgccgtgcgtattccatggtagaatgaggccatcacaacatttagtaacggaggaaattatgtacaaagctgtcgttttttttgatttagatcaaacgctgctcaatgatgacaaacaggtgccacccgaaaatgttgctgcgctcaaagcccttgaagccaaccagattctgcccgtcattgcgactggcagaaattactacgaactggctgacattatggcagcaactggggtccgcagtgcaattgctgctaatggtggtgacatttttcttgacggcgatcacatttttcaaagtgtgattggcgagccgcaactcacccgttttctcaatacgagtgcagcacaagacattcaagttgccatgtacaacagtgaagcatcggcgctgaccggccataatcagctcacaaccgataactatgcgcaggtgcggcaaacaccgccgccggtcaagccatctttctacgagcatgaagcaatctgtatgatgttaatgtttgtaccatggaccgatgcaggtgaccagattgggaaacaattcattcaagatttcccagaaatgacgttctaacgcaactcgcattatacgtttgatgttgtcaatcatggcatttccaaaggcagtggcatggccatcctgttaaatcagccatccttacgtggtctgccaacttacgcatttggcgacggttataatgacattccgttgttgcaagcagctgacaccggaattgcgatggggaacgcttatccaaaagttgcggctgttgcggattatcaaacggacgattatcgcgaaaacggtattccaaatgcacttgcacattttaacttgatttaatttttaatgcgtaaaaacacatcaatattagcctattggtgtgctttttttatggcgcttatccagcagcattttccgctaaatttcggttgactttgcaaacgtatgttcccataataataagtgtgaactgtgaacttaaaaatttaattttaggtgcaaaaacactatcatattaaggtttgtaacacttgctataccgtgttggccaattaaagtcaagaccgcggcagcgcaaattttctgctatactcaaagcatgctgtgcgttatttgggcgtggtcgaaacaccgatcaataatcgtacaacagcgcaaaatctgctgatggaggggtctctcatgttagaacaatcgacaatgcatccggtggtttggatcaatcaacatacttatatcagtatcgtcaaaaatgcggattataatttagaagtctgggagattaccgacgaaaatcggcagcatcggatggctcggatgaattacaaatatcaccgtgataactttgccggattcatctatcgactcttcccacagatcgacttgattcaaattcacaacattcaaaagaagatcaacccgtatttcgacttagaggtttagaggtgtacacatggatagtctggttattcagcttctgatcatggtcgttgttgctttgctggtaacactgctcgtcatttttgcagaatggcgcgctaaaaattttaaaccttggcaactcggtgttcaatcggttgtcgccgtggtcttactgggcgttggtattagcctgctaacagttagatgaggcaacttggtaaaacagccaagtctgttctgaggctggcacacttgagctttcaacatgttgcaggatttaaaaaaattattattcactatacagttggtcgctttgcgttataaagcggccttttcgtttggttccacgtggaacaaaaggccttcttctcgtctaatatggcccaacaaccgcaatataatggattttatttttggcatcggatgattggccttcgcagttgatgccattgatcactacttttcttcaaaattaaatgacttggctgatgccctccctctttatgcaacaccctttagcaaataaaacgcgcaaaatacagcattcgaattccttgaagacgacccaagatgttaaaattcaacatcgcatttgtcgcaaaattgaccattttgatgtattagaatccgaatacccgcgaattgaagcaattttaagcctgtcaaaataaggacacttttccgccaaatagcgtttttattaatggacgtcatccaattctatccgtatacttgcaccaacaaagcgattagggaagcactttcaggaggggcaagtatgaataaaggacgatcaaagggtaaacgtatttcgcaacgcatggtgatcattgggattggtgcattagccatgattggcgtcaccgtttttttcctagtcacatccaaaaaaccgacatcatcacccgcaccgacaacgatagccaccttccaagtgaagaagcatgagttacgagtgccaggacaggtacaggccgtacgtacgcaaaaaatcgacattcctgaaggcaccgtccaaaacatgacggttaaaaatggcgatagtgtgacgcttgatcaacaacttttgacggtttacaagcctgacgtacaaacaaaaattgatgaagcttcacgtgcgcttgaaaaacaacaacgcagtcaagccacacttgatcagcaaatcagccaaatcaaagctactttaagtaagaccgccgccgatgatccacagaagtccgccttgcagacacaacttgatgaggcgcagaataatcgccaagattcggctgatgccatcacccaatcgaatcaggatatcgctaaattaaagcaaagtctgaatacggtggttaaggctccctttgcaggtcggctgtacattgactatcaagcaaatggcagtcagaccatcacggaaacctcggctgaagttgaagccgttggtgaggtctccgaatttgattattcaagtgttaaaatcggtcaatctgcaaccgtacaggcgctggcaagcaaaacaaagcaagcgacagacatcaattttattagcagtgatccggctaaatccagcaagccgaatctcgccaagtatgaactcacgacgaaattacgtgacggctttttaaacggccaatccatcaccatcacgattcccctaagcggtttgttaattcccaaagaagcggttaaggacggggccgttttcaaaatcgtcaataaacgcgccatccgaactaaagtaacctatgtggcaaaagacgatatgtatgaagtctcagatggcctcagcagcggcgaccgcattcttcaaaaacccgacaaaacaatcaaagacggggcgaaggtgaacgttgatgattgatttacggcatgtcaacaaaagctatctgcaaggcgacacagccttcccagtgcttaaagatatcaacttacacattgatgaaggcgagttcgtcgcaattatgggcccgtctggctctggcaaaaccacattaatcaatattattggcttccttgatacagcttttgagggcgactacctttttcaaaacgaaaatgtcgccgcctttaatcgcgccactgcgtcaaaaatgcgaaatcagcatgtcggctttgtctttcaaaatttcagcctaatcaataacttaaacatttttgaaaatgttcttattcctctgagttatggtggcaatcgacgaagtgatgttaaagacaaaatcactgagttgctgcattctgttggcctagtcgatgttgaaacgaaattaccgcgcaatttatctggcggccagcagcagcgggtggcaatcgctcgtgcccttgcaaattcgccgcaattcttaattgccgatgaaccgaccggcgccttagacagccatacttcggcagagatcatgcgactctttaaaacactccatcaacaaggcgtgaccatcattatggtgacgcatgatgaacacgtggcgctacaaagtgatcgcatgattaaagtattagacgggcagatcatcagtgacacggaggttagccatgcgaataactgaattaattcgaatttctttccgtgcgctaaccgctaacaaacgccgcagcctcctaaccatgcttggcattgtcatcggtatcacttctgttgtaaccatcatggcactcggtaacggtatcaaagctgccacactcaaaaatttgcaaactgatcaatctggccaacaaacggctgaaatcaccttccttcctgaaagtagcactgcctccacggctggttttaaggaagatgatgtggatctcgcctatcaaaccgctccagacaaaatcaaaaaagtgactatcaaacatgaaaaagagcgcctacaactgaatggtcagttagccaatcaagatacgatgctatctgccacacttgttacatccatgcctaaagtgcaacttgcagctggaaataaattaactaccgattccttacaaacagatggacatgatgtgcttttgtcgaaaaagttagctaaaaaggtctttcatggcaatgcggccgcgttgacgtcatctgtttttatcgggaagcgaagttacaacattgttggtattttcaacacgcctaaagagtcctattcagctttagatgttgacgttttaattcctgaaaaggcttataccgctggccagttaaacccaggagggcaaaaattggccatcaccttccaacgtggcagtgacatttcccagttggcaaacgccatcgttcgtcagttgaagaaatctggtactgaacgccgcaatggctcgtaccaatattttgattatggtgaattactaaaaggcatcggtaatgtgatcagcgggttaacgttgttcgtcggggccattgcgggtatttcgctactgatcgcaggtgtcggtgtcatgaacatgatgtacatttccgcctccgaacgttcacaggaaattggcatcagaatggccgttggcgctaccccggcagaaattatgaaacagtttctgttagagtcagtcatgctgacattaaccggcggcgttgtgggtcttgttctcggtggcttgattgcctggatgatcacagcattcttgccatttaagcccgtcataacgcttggttccatcatcggcacctttgcaatttccagcattgtcggcattgtttttggcatccggccagctaaaagtgctgccaataagaacttgatcgatattctgaaatcataaaaatgctcccatctaagtggtagtatgaagctttctatttctacattgaaagttcttgaaccaacgaaaaaaacggttagatctgcgagatctaaccgttttttatacgctattactgctactgcttttagccaaaagacgtcattgctgaagacatcattccgagcgcttcttattgcgagcccctgctaacccaaacaagctcgctatgctagtcaagatcagcccaacaatagacaaatcattcgccgatgtatcacctgtttgcggtagctgatgagtcgttttcacaggtgtttgctgattaattgacagactaggtcgaccagtaacactcggcactttgcctgtctcatgaccagtactcgtaccggtatttgtgccagtgccggtatctgtaccagtacctgtatcaggaagcggccctgatttcgcaacgatttcaaagaccgcttgctgggtatcgacattttcaagcagataatttggcagcaacgcttggatacgcttgaggccgcctgcgctaagtgtcacggcgtaacgaccaacaacaattggggcaataccatcagcaaaagccaagtcactgtcttcaagtatgatgtgactaccatccgtaaaaatcaattcgaaatgttgagcattcagttctccaggttggccatcatagattttttgctgcatgccgctgagctgtcctgacaaaaccgcgggtgtgatcgtaatggtaccattcattgttgtgtcgttaatttgataattaggaccaagtgcaaccatcactttagcaatgccactagcacttaatcgatacgtgtaggtgccaacattaacgctatcattggcaacatctatatctgcattcgttaaggcgactgtttgtgcaccagttggtagttgaactgttaccagtaatccactagcttggcttgctcgggtaaccccgtcatactggaaatgaccattattaacggtggccacgactgtcagtggcgtgatggtgatcgtgccggtcaatgcgttcaaatcggtttcattaagtgcatagttggtgccggctgctgctttcaacttcgctattcctgaatgactaagatgataatgatacgtgccagttgtcgtgttatcgccgtcaacaacaatgtcctgcgtcgtcaatgcaacagttagcctagcagtcccgcgcgagaggtaaacgacgccattgagacctgacgcttcacttgcctttgtacgaccatcataaacaaatgtcgtatcatttaccgttgcagttccttcagccggggtgatcgtaataatacccattaatgctgctagatcatctgctttcaattgataatttggtccagctacttgttgaagtttcatgatggcgtcagtacttagccggtagtggtaactgccaacattgacaccatcatcagcaaccacgatatctgaagagtctaacttaattgatgttgtatcgtcgccaagcttaaccactgctgttaacccttgagccttactcgcctttgtttggccatcatacataaatgaaccatcattcaaatcagcggttgttgttgccagtgtaatgttaatgttgcccgtcaattttgctaactctgaaactgttaactgatagttgctgccgactgcctgttgtagttttgctataccggtggcggtcagcgtgtactggtaactcccaacattcacaccgtcattgccaacagcaatgtcggctgacgtcaaggttactggcaccgcctcattaccaactgtgacgtttgcagtcaagccttgtgcctgaccggctttcgtctggccatcataaacaaacgaagtattggtcagagttgcggtgcttgctgcaggcgtaattgtgattgtaccagtcaattttgctaagtcgtcagcgtttagctgataattgctgccggccgcctgttgcagctttgcaataccggtggcggtcagcgtgtactgataattcccaacattcacaccatcattggcaacaacaaagtccgctgacgtcaaggttacgggcaccgtctcattgccaactgtgacgtttgcagtcaagccttgtgcttgaccggctttcgtctggccatcataaacaaacgaagtattggtcagatttgcggtgcttgctgcaggcgtaattgtgattgtaccaatcaattttgccagctcagaagcatttaactaataattgctgccgactgcctgttgttgctttgcgataccagtgtttgtaaggctgtactgataaatcccaacattcacaccatcattaacaacagcaatgtcggcggacgtcaagatcaccggcaccgtgacattgccaattgtgacatcgccggtcaatccttgtgcctgacttgcctccgtctgcccgtcataaataaatgagtcatcacgcaactccgcagtgccttgtgctggtgcaatcgtaatcgtgcctgttaagctgcccagcaagtcacttggcaactgataattggcattcaacgcctgctcgactttcgctacaccactctgactcagttgatattgataatcaccgacattgacgctgtccgatcccaccacaatatcagtcgagctaagatcaacaactgtcgtgccagaaccgaccgttaatgttaactgcaatcctgaagcctgactagcagtcgttttgccatcatatacaaattgtgtcccattaacagttgcagttgcagtagcaggtgtgatcgtgataacccctgggtgagtattgatatctgtctgatcaatcgtgacttcatcacccaaaatcgcttgaatacgtgtcaatccactaccattaagaagatatcgatacgtacctacatctggtgagtctgcttcaacaagtgaaatatctgtcgaagtcaaatcaatggcttgctgtgggccatcactcaaagtcacattaagaaccagttttggcgcctgactggccaatgtcgtgccatcataagtgaacccactattattcaactgacctatagctgtgcgaccgatgataagttgtgccgtactcgtaccggtaaaattatagttagccgctgactcaccagcatcatttgtcagttcagcaatccgcgcccatgccgcctttgaaagttcaacacggtagacacccgttttcgtcaatgcatcagcagcaatctggttgtcagatgcatcaaaaaaattaaggtcactcagttgtaaagcaccagcattgaagccatccccaagactcagagaaaaggccgtcagatccaccgtaatcggttgacccgtcgcagttgccgtttgagtaccagtcaacgaatatgatgccgccagccgttgattataaaaaatcttagctgagccactttcagccccatacgcgtaagtgactgtataccaagtcacctgatcactaggcacactgcctgtgacaacaccgtctctatctttagaggcgatcacagccccgttctggtccgttacagtccaagtcaaatcgctaagtggtatctcaatgatctcagtgccattctttttcacggcgccgccaaagttcagttctggtttccaaacctgacccgtgaaaaggttaatgtcatgggcatggataacggggtcattcagatgaaccttgtaaagaccagtgtacgttgtgccatctgccgcctttaatgaccaattaaaactgaattgttcagttcccgcaggcatcgtaaaggattttgtcgcggtattaaaggccacgccggttccctgaatattcgaaaccacaatttgatcctgactgacacctgaaatcgccacactaaatagatcacgcaaactaacatgagcagaatctgtataggcgtcggcattttgatttagagcatccggggtcgtcggcacagccgtcgcggcatgcaaaactgtgatccggttattggaaaacgcctcttggtcaattgtcggtgtcccagcaatcgccacttcaggaatcagattagcattaaaagctttagcaccaatggcagtcacactcgctgggatattgagcgcatttaagatgatgtttgcttcaaacgcctcttggcctattgtctgcagacctgtccccaaggttaagttgctaattgagttatagacaaacgcatatttgccaatcgcggtgacactatccggcacagccaaaccattttgaatcttattgtagccaaaagcactgtcgccaattgtctgtaacccgtcatttaaagttagtgccgggattttgttgccgacaaacgctgcatttttaattgtcttcaaatttggtggcaacacaattgcattgttaatcgtattataggcaaaagcactgtcaccaattgactcaagcgctgttgtccgactgaagtcaacattttgcaacggtccaaactcagtaaaagctagatcaccaattgtctgtagattaggaccaaatgctacttggatgaggtgtccaccgtaaaaagcttgatccccaatttgttcaagtgagtctggtaaattaatcgccgtcgcactggaaaatgcgaatgcctgaaagcccaatgttgtcagccgactattgtctgcgattgcaaccgttcctagttttgacccataaaaagccgatccatcaattacgctgatgttcgccggtatcgtccgcatcggaatttgattgccaggattatcctgcccattaatgtcaggcaggtccttcatgttttggataaattgaaaagcgccgccagtaattgtctgaacatcaggaccaaacgtcagattatccgtgaagagatggaagaaggcttgattgctaatcgttgctgcatcgacggtcacattcgtaatgcgtgcatagccaaaagcagtttcagcaagcgttgttgccttgccgcccagcgtcagcgatgtagccttagtaccgtaaaaggcattcttaccgatcgttgctgatcctgccacattaatcgtgtcattaatggtttcgtaggcaaacgccgcttcgccaatattagcaacttcatcatccaacgtcagcgactcggccttaagcccataaaaagcattttgaccgattgttgccggacctgcgacactgaccacaccagtaatcgtggcataggcaaaagacgactcaccaatgttccctgcaccgttcaatgtaatcgcactcgcattgacaccggcaaaagcctctttaccaataacagccgcattatcgacggtgatcccaccagtgaatttactataggcaaaggctgaagcaccaattgtcgtgaccgtagaggcaacatgtaagctagtcaaattactcaagttaaagaatgcaacatcctgaatcgcagtcaccgtataagcttgaccattatacgagacagttggcccaatattaatgtcggtaagcgttgcaccagagtcatgacccgtaacggttgccgttttggttgtctcatcaaaactgtaagttaaaccgtcaaccgttgcgtcagttgtcgcggtattggctgttactgtaggttgagcagcagctgtcgcaaccggttgggcttgactactggccgactgctgtgcactggaagcttggctgctcgcagctgaagatgctgctgtttcactagcagtggcagcctgtgtagcagcttggtctgcagccgcggctgattgagccgctccagaccccgaggccacctgtgccgaggttgctgaggctacctgtgacgcatcagttgtctgttcagggacagccgcctgactcgtaagtgtttgcgctgctgatgaactggatgtttgactgctagccgcgctcgccgcagatgaagccttgacagcctcgccggagttagtagcattcacagcattgcttgatgttgtcgcttgatcactagtcaccgcactttgagatgtcgctggctccgctgcctgtgacgttgccgttacttgtgtctgtggcgagcttgtatccgccttaacttcatgacctggttgaaaaaaggctggtataaacagtaaagcagctccggcaataagccaccgcttttttgctttatacatccgaaaacggacatgaaccgtctgttccgcctgtcgagccaattgaatccgtttagaatctagtttcaagatcatgatcctcctacagccatgttaatagcgattcccgtcacgacgcttaacgaaccatctcagatacgatgattcacttggaaacagtaagcgtgtagaatctgtttttcattatataactgattttattaaaaaaacggaaaaatttgtatccaattttcagaaaataattttataaatattgcgatagaaccagtctgaaaccggcattaactcaagtgcttgtttttaaatgtatcgccgatcctctgttgtttctgcaaatcagctacatcttcgatcacaataaaaaaacacgatgttggtcaacgatccatcgtgttttttgacaagtatctttttagagcagaccctacttaccaatttttgcgcagctgcttcttttaatcgtgccggactcatcagcaacttgcttaagttgagcttctgaccacacttatcttcaaagcttttcatcattctatcagtatatttttaattaagattcgtttgtttgcattctaaacaaatggcaagcattttgttgtaatcgtaacaacaaggctttgcagattgttttcattttctagttgacttcatacagaacatcgcgtatgttaaaaattatcacataagatgagatttacatgagaggagttttgtcgatgaagttagatttggaactacgccctggggcaaatcgttttgtgagtgagtcaggtgccttggcatacttagatacgatcttagcggattttaatcaaccagttgtgattaccggcgaaaaaagttttactgctttcaccaaggcttatcccggcgaactgaacttgccagtctatcattacgacggctccgccagtgatgagaatggacacgaacttgcacaggaaatcggtcatgctgacgccgtggtaggaatcggtgctggtcgcttgatcgataccgccaaagttgcggccgaagccttgggtgctgagctcatcagcatccccaccttggcctctaactgtgcgccattcacaccgcttgctgcgatttatcatccgcaaggtcatacctttagttacgttgaatattttaaaaaatctgcctatattactttggtagactataacctcttattgtccaccccacatgatttctttgttgctgggattggcgataccttggccaaatggtacgagatggacggcattacccgtgataaagtggatcagttaaaggcatacggccagttgagtcgtgccgcggccaaaacgattcaaaagattctctttaaagatgctgaacaggccttggccgatttggatgccggccgcgacaccccggcttttgaggcggttgccgataccattatcggcttggctggtgaagtcggtggcttcggcggcattgatggtcgcgctgccggtgctcacgccactcacaatggcctgtcctacttaccagaaacccatgccatcttgcacggttcaaaagtggcttacggcattctggtgcaactggctgaaaccggagatgatagcgaaattcgcaacttgattccattctatgaaaaaatcggtttgccattgaaccttgaagatttgcatgtcaccgatcaagtcgatgaaaagattaagcaagtggccgaatttgccgctaaaccagatgaaaccttcatcttggttgatccaactttaacccctgccaaagtagcagatgcgatgacaaaagtggaacaagtcaccagtgagccagcagcttaaagtccgaaatcggacaatctaatgaatactgtttcacaaaaattttaaaaaaccttgcagccctcttaaaatggttgcaaggttttttcgtttttgtattaaagaaagcatatcaaaccacgaccgcgcaaagtcctacctgttcatcgcgttgtcgattcactttgcaaataccctaacgccgccgcgccaacagccttggcagcaatcagaatcgcatcttcgtccatcataaagtcgggactgtggtgaggatgattagagccgtctggcagctgacagccaatgtagaagaaactgcttggtaccttttgggcaaaatacgcaaaatcttcggatgggtcttgaacgccagtgtccttaatggccttaatctccggaatatttgctgctttgatcgcggccattgcattttcggttaaggtcgcatcattcatcaaaaccggataattgtcatcatagtccagctttgttttaaccccaaacatggtttctagtccttggttcatggtgacgatctgttgtcgaatcgttttgcgcgttgtttccttcatcatccggacatcgcctttcaatacaacgtcttgcttaatcgcattgaaagaaccagcgccgtcaaatgagccgatggtgacgcttgccgtgtcaaaaggatcaactcgccgcgacacaatcgtttgcagtgccgtcaccaaatagctgccagccacgatagcatcgttgctcaggtgcggcatagaagcgtgtccacctttgccgataatcgtatcggtaaagttagcccgcccggtttgggttgcgcctgtatggtagccaatcaaccctgtcggcatcgatgacatgacatgaacgcctaacacattatcaacgccttcgagaacccctgctgctaccatccccttggcaccacctggagagacttcctcagcgggctggtgaatgattcgaatggtaccggccaatttggctttgatcttgatcaattctttggccaacaccagcaaataagccgtatgcgcatcatggccacacgcatgcatcaccccaggattctgagacttgaacgacaggtcgttatcctcttgaatcgccaaggcatcaaaatccgcccgcaacgctaacgtcggtcccggttgaccgccttgaatatcaacgtacatgccatagccctccccacacggcgtcacggggacgttcaaggctgcataatattgtttgatataagcagccgtttgtttctcatgaaacgaaatttccggatgagcatggagatgccgccgaatcgcaagcatttctgattcatcggcagccagtgtctgcatcaattgttctgttaaagtcatggtctttttcctctctgtgattttgtctgaactttcggcaactttgcaattaggcgaacaagttgcggtcgaacggccttaaaaataacctccgcgaccacaaaaccgactgccagtgccatcgcaatcaaaatgacgttatagatttgctgcgcagcactcgcggcttttcccatggtgaaactgcgcgcacctaggtaagcaatgccgcctggcaccagtgatacaagacttggtatgtaaatcgtattaaccggcacccggtgacgaatagcaaaataattccccagcaatccgatgatcaccgtggccgtgaagttcggcaatatgaggctgtgatcctgcaggctgatgagccagtatgcacaccacgaaacgccgcctgtgatcccagctggcagcaaggcgcgtttggggatgttggtgatgacgccaaacccgatgctcgacaagacgctaatcagaaattcaattaataagcgcatgctagcgccctccccaaacattattcagtacaatcgcaataacaaccccagaaccaatcgcgccagctacaaaaatggcgtctacagtgcggacaatgccgctgatgatttgccgcgaaagaatttcccgaatcgcattggtgatggccaccccaggaaccaacggcatgagggcactaataataatattgccggaactatcgccccacccgatgctcaccagtaattccgctaaaatggccaccacaaaggcaccagtcgcttctttgaaataaggcgtcgtcgtgcggcgaccgacatactcagccgcaagataaccaaaaataccaacaaaaaaggctaaagccaaatcaccatttgtcgctttgaaaagcagcattggcgcgaccgaaacccaaccggcgcccagaatccgcgcccaccatgggaaattaatgacttggtgatcaattcgcgcaacttcttgcttaagggcttcaaatgttatccgatgagcgacgaattcacgcgacagttgattcaactcatcgaccttttgcaagttgaatccgcctaatgttgatttgattaagcgcgtacgactttcgttctccaaactgacaaaaactgccgtaatcgtggcataacacgcaacgcttgcccctgccgcatgcccgatatattccacggttgtctcaatccgtgatgtctcggcgccggcattcagtaaaatctctcccaccttgccgcagacttctaaaatttcctctgttcctggttgactcatcgcgtttgctcctcaagatcgcgtttccgcgttttgcattttattaattgtcggcttttttgatagcggtggcaagtgatgacattaggcaatagccagcaaatttttctgaaaaggtttttcatttattaaccccttaaacaaatgaaaacacaagtgcgttatggcgtgttaaaaccaatgaaagaaataaataacaaaacataaccaatgcctaaaaatgcgattatcagcagtagcgccaaagccagtttcactgctaatgaaaaatcttttctgcgcaaaatgacgactatcccaagtcctaataagatgagcaccagaaataaaaagaaaaaaagtagtgctctagatgtccaaaagcctaacatggttaccactcctctaatttcatcttgctacttagccgttccccactttttaaatcgataattcgccgacagtgacaaggcaaaaaaacgtcatgtccagtagactttttcagcttatcaaaggttgcttcaaagcacaaaactgttgcttctcatgatcacgcgcccccgtccaaggctacttacacgtcggtctctccccgggctggcttggcatcaaaaaaaccgaatcgccagctagtttggcaattcggtttccaatttattgggccactttactaatgcgtccctgctcaatgtacactgacaaaatcgccacatcggcaggattgacgccgctgatacgactcgcctgcgcaatggtttctggctggattttaaccaacttctgacgtgcttcagttgccaaaccattgatggccgcgtagttaatacgtagcggaatctttttgccttctaggcgtttcagtttggcgacactggcttcttcctttgcaatatagccagcatacttaatttgaatctcaacctgctcaatgacacgatgatccaaagtcggattatctggcaagaattgcgccatcgtctgatagtcgatttccggccgcttcaggaagtcactggccaagacgccatccttaagtggcgcataatgatgggcctctagccatggattcacgtctttaggcttcaaccgggtcgtattcagccggttaagttcggtttcaatggcctgacgctttgccaaaaattcagcatagcgctcatcgctaattaaaccaagctcatggcccattggtgtcagccgcagatcggcattgtcatggcgcaacaaaagtcgatattcagcacggctggtcaacaggcgataaggttcattcgtgcccttagtcaccaaatcatcaatcatcacaccaatataggcatcggaacgcttgagcgtgaacggccctttgccttgggcacgcaacgccgcattgatgccagccataatgccttggccagctgcttcttcatagccgctggtgccattcatctggccggcagtgaaaagattatcaacgactttggtttctaacgtggccttcagttgccatggctcgatcacatcgtactcaattgcatacccggcacgcatgagttcggcatgttccaacccagccacactatgcagcattttcagttgaatttcttctggcatagaagtcgaaaaatcaccgacatagtattcggaggtatcgcgaccttctggctctaagaacagttgatgccgcggcttatcagcaaaacgaacgatcttatcctcaattgatgggcaatagcgcgggccaacccctttgatcacaccggaaaacattggcgcccgatccaaattatcgcgaataatttgatgggtcgttgcattagtgtaagtcatccagcaactaagctgatccttcaaataaactgaatctggcgtcgtgaagctaaaatgattcggagtcttatcgccaggctgttcctcggttttatcaaagtcgatggtgttgccattgactcgcggcggggtcccggttttaaatcgccgcaatttgaagccgagctgttcaagattttctgacagcttgatacttggcaggctgttattaggaccagaactgtacatcaactcaccgatgataatcttgccacgagaactggtgcctgcggtcaaaacaacactcttggcccgatacattgcgccagttgccgccacgataccgacagcttggccattttcgacgagcacctcagtagcgaggccttgacgcagatccagatttggcgtgttttcaatcacgtgtttcatgctgcggtgataggctgctttatcagcctgtgcccgtaatgcacgaacggctgggcccttgccggtgttaagcatccgcatctgaatatatgttcgatcaatattcttgcccatttcaccaccgagtgcatcaatttcacgcaccacgattcccttggctgggccgcccagacttggattacacggcataaacgccagcatttccaagctgatcgtcaatagtaacgtcttttggcccatccgcgcggctgccaaagcggcctcacaaccagcgtgaccagcaccaacaacgatgacatcataggtaccggcttcaaattttttgacatcaggcattcgatttcctccatgaataagtttctaattggcactgagctttacttgcccaagcagaattgactaaacaattgggtgattagttcatctggcgcactttcaccagtaatttcaccaagtttatcccatgccgcagtcatgtcgatttgcacgagatcaattggcataccagcatggattccggcgatcacagcgtccaagctcttgttggcttggcgtaatagcccgatctgccgagcgttggaaaccatcactgttgtttggctattttcgatgccgccgaagaacaacttcgcaatccgttcgtctaaggcatccatgcctgcgctagtcgggatagcggtcttgatgatttcatccggcgaaaccaacttcaacaaggcagtggtatctagctgtgcaggtaagtcctgtttattcaaaacgataatccgttttttattagctgttgcttgaatgagctgttcgtcttcatccgtcaatggttcactttgatccaacactagcaaaatcaaatcggcttgtgtgatggcttgacgtgagcgttcaacaccgattttctcgactttgtcagtcgtgtcatgaataccggctgtgtcgaccagttttagcgggacaccacgcacgttgacatactcctctagcacatcacgagtcgtaccagctacatcggtcacaatcgctttatcctcatgcaacatgtgatttaacagcgaactcttcccaacgttgggacggccaacaattgcggtggctaaaccttcgcgcaagaccttgccttgactggcggtactcagcaaattgctgatagctttttgaacggtttgcgccttttcaagcagcattttggtggtcatttcatcagtatcatactcaggatagtcaatgttgacttccacctgtgccaacacttcgaggatttcctgacgaaggcgcttgatcaatgtatgcagattaccgtctagctgattgactgccacctgcatcgcccgatcggttttggctcgaatcagatccatgaccgactcagcttctgtgagatcaatgcggccgttcaggaatgcccgtttggtgaactcacctggctcagccatccgtgcgccttcgcctaagagcaactgcaaaatgcggttagtggcaacaataccgccatgacaattaatctcgacaacatcttcacgggtaaaggtcttaggtgccaacatgacactaaccatgacctcatcaatcaactcgccgctttcagggtcgacaatatggccataatgaatcgtatggcttttaacctgcgagaggtcttttcccttgaaaacttgattagctgtcgctacggctgtctcaccgctgagccgaacgatgctgatagcaccttcgccaggcggggtggagatggcagcgatggtgtcgtacgcagtgatagatgcagacatttgaaagactcctttttgagatgattcggtaagaacaatgagttgatgggattggacatggcaggcgactgaggcggatgagtgatgtggcggcctctgaaatgcgcaatcaggcgcatctcggctatgcgaaggacagtccacccagatggcccaaagcccagactttctggttaggggggctaggcggttccgaaacgcgcaatcaggcgcagaaacctgcacataaggacatcagacccaaatggcaaaaccagccatttaggtctgatgccacttatgctccggtttctaaccgcgcctgattgcgctctacaaaaaaagcgcaaaatccagtctttcccccctatcagggaaagactggataaagcactttgactacttcatcgttattaaactgtgactatcatacttaagcaacggtcacttgtcaaaagttagttacggtcttttgggtgtgactacgacatatcgccgaggatcgacgccttctgaatgggtctcaacgtacgtattgtccacaagtgtcgtatgaatcgttttgcgttcaaatgatggcatcgggtcgagatagacggctttgccagttgctaaaacctcgcgagcggtgcgttctgctaaacgtgtgacggtcgcctgccgtcgttcgcgataatcgccgacatcaagcatgattgtccatttacttttggcataatgattgaactcagtttgggctaagtattgaattgcattgatgattttgccatgcttaccgatcaacaggccttcttcatctgttttcaactgaaatgtgaccgtgttaccttgccgttcacttgtgacttgagtgtcgatccccataccagtggtgatgtcttccagataactctgcaccatggccaatgcggtttgattatctcgctttttggtggtgatatcgttgaaagcactggcaattttcttgcctgcaccatcagttaaagccgttgcaagttttttccctgcccgcggtttggcaggcggatcgtcgcttggcgtcggatcagcgtctatcggcggttccgagggttttaaattaacaatcgctggcttacgcatcaagcccagaaatccgttcttattttctcgaacgacttcaacgctaacggcatcacgcggcaagccaagctgcttgagaccagtttcgatggctttttgaatcgtactgccttgaaaggttggcatcttgcttcctcccgttgttatttacgccgtttggttgcttttttgtacgctcgcttgagtgcccgttctttttctttttcagcctgcgcttttgcttcacgttcgcggcgaatcttgaatgggttctggatcagcaactgctgaatcattgaaaaggcattggtaactacccagtaaatggccagcgcacttggcaaggtaattgagaaaacgaaaatcatgacaggcgagacgatcatcatgagccagctgctagaattacgcgttggttgtgccatcatggataagacactagtacccaacgtgaataaagttgccagaatctgcataatccacaacggatctggttgtgacaggttcatccaaaggaaagtacccgtttgcagtgatgatgtgcgcaaaattgcttgatacagcgcaatcaggaatggcatctggatcacaatcggcagacagcccatcactgggttaaccccagctgaagcataaagtttctgtgtttcatcacgcagtcgtgtctgggtttccgtatcctttgaactgtacttcttttgtagttcttttagctgcggcgcaatttcctgctgtttggacatgctcttgattgacatgtaactcagcgggaaaatcaaaattcggatgatcaaggtgaaggcaataatcccgacaccagggttgccaccgaacaaattcgccagccagataacaaattgaccggctgtgtagacaacatagcgatcccagaaccccgtactattttgcgtaacgggtccggttccgcaggccgtcaaaatgaagaccaggcttagcatgctcaaaatgacgagcacacgtttgatttgacgatttttcacaaataatccctctcttttttaaacgcggtcgctaggcgcagaaatctgcacagaaggacctcaaatttaaatggctaaagcccagccatttagatttgagtccgcttatgctccggtttctaaacgcgcctgctcacgctctggtcagatgacctcgatgtcttcgttcaggatgccagccaatcgcatgacatgaatcaaatttttcttggtgccagccatgtcgagctggttagcagatttacgtgcaataaccaaaaaatcggtttgcgcgtcaatattaggttttaactccagtaaactttgccgaatatagcgcttaatctggttacgcatgaccgcagtgtggccaactttcttccccactgagataccaacacgaaaatgcggttggtcgcgtttcatgtgatagatcacaaaattgcggttggcaaccgaatcgccatggtcaaacacattctgaaattcagcttcttttttgatccgatatgacttgcgcaatgatgctccctcacaatctggttctaagtatacaagatgactcggtgttttcctatatgtatcagcggtttgtcgacggtttctaatctgcacattgagattaagctgttgagcagaaaatgaacggcaacgaccaacgattgggccattgccgttcattggggtcatgctgctgccgccgaaacgcgcaaacaagcgcagaaacctgcacgtaaggacctaagtcgcaatgaccaaagaccggtcatcacgacttaggccgcttacgctccggttcctaaccgcgtttgtttgcgctctaaaaaaaaccactgacgcggtcagtggcttaggcagataatactttacgtcctttagcgcgacggcgtgctaaaactttgcggccgttctttgtgctcatccgcttcatgaaaccatgaacacgttcacggtgacgtttctttggttggaaagtccgtttggttgtcattgacgacacctcctatgaaaaacgatttatcttattaagatgacttgcattatcagacatcatccgagtttacacgaggaagcaactatcgtcaaggttttttccattgaaagcaggatctcatgatgatgacacgacatccacagatagttatgagcctgtggataacttgtgtctcaaatttttagatttcggtcatttccacaaaccaatcacaggaaattcgcagataaacaggggtgtgaagaaagttatccacaagctgtcaaagccctgttcatatcttgtgaaacacttactgctacaaggtttttgttccacagtgccaatgtgcataactgcgaatttattgtcatcacgctttccttgtccccgaccctggggatagtctgttcgcaccctgttcatttctcaattttttgtttgtggaaaactgtgctttctgtggaaaacttacgccagcaatgataaacttatttttacagagcgctcgcatgcccggttagaaaccggaacataagtggcctcgagtctaaatggctgctctttggccatttagactcgaggtccttatgtggaggtttctgggcatgcgagcgcgtttcagcagagcgtgaattggcgcgttcaataatcggcgtgtattggccttgcctgtgatgaccgggctttggtcaatgcagtcaaggtccttacacgcagttttcggtgccaatgagcgcgtttttatataggaatgtccgtcatcactcgtcagcatagctataagctggtttgctaccggacataattggaggaggggcatga

SEQ ID NO: 643 - DNA, 7154 bp, Lacticaseibacillus paracasei
  source 1..7154: mol_type = genomic DNA
atgacgaaacaagacgaaactcaccgggtcatgttcaccttgaccgatcaggcgattgcaaaattggatcagctggtagcaaaaaggcaacaggaagtgaatcaaaatccggatctggctaagtaccatgtcagagtgaccaaatcaaatatcgttgaggattggttatcaaaacagtgagctttaaaaagcgctaaagggcccgtgctagcgtttcttactctgacgggtacaattaatgctctttacatcaaaaacggcttagaacgcaaatataagcgttctaagccgtttttatcagcatatggtcatggcacaagtgaaaagctttagtgatgaatcaaatttagtcaacgagcttttgtcggtgtatggcgctagccctgccgaagcttcagctgaggctcttctgagccacgcaagcgaagcgcgctagggcaagccaaaggcgcgcaggcatagccggagttaaacgtggcgaagccacacctttttagggagcgaagcgaccaggggttggtatggggtttggggagaggttctccccaagatcttttgtggttgttaacaagcaaaacacaaacacaagcctcgcgcgcattatatatacttctaaatacttctaaatactttaagtacttagggcgacgagaatggctcaaccacgcgtttaaaatggccaataggtcaccaaaaagcacacgataggtcaccaaaaagcacacgataggtcaccaaaaagcacacgataggtcaccaaaaagcacacgataggtcaccaaaaataccagttatgttgattcttgtaacctttaaatgtaaagtgtctctgaggtgaaaatttatggttagtgctgggagaattctttggacaagcgatcgggatttcaataaagatgaaatcagggatcaacgctattttcttgttgcagaacacaacgatttaatcactaaagcaagacacgatcttaatgcccgtgaattaaaaattatggattacgtcgtatctaaaataaaacctaatgatgagcattttaatttgattgatacctcaatgtatgagttaacgcgtgtactcgatcttaaacgcagtgggcgaacatattcacaacttgctcaaaatcttgaggatatgcgggcaaaaagcgttaaaatctataatccctctgagcgacggctaaccctaaccggttggtttgaagtagttgacatttgggagaacggacaagtaaagctgcgaatcaataaacaatttgccccttttcttttaaaacttaaagatagtggtcactatacacagtattttcttgaagatactgtacgtctgaaaagcaagtatgcaattcttctgtataagcttatgcgtgaagttgacaaggatcacggtcaatcaattggaatccttcaagggacaccggaagaatatatggcttggttaggttctccttcaaaatatcagtacaaatatcttaaaaataaggtgcttaatccagccattgaagaaatcaactgcaaaatcaatgatatggaactagagctgctgcaggcacgacgcggccgtaaggtagtacagattgaaattcacaacaatttcgcacgtagaaaatcactgcgatatcagtaaatgcaactaatcaaaatttatgctagaatacagttaatcgaaattactcatgagtatcactaacccgcacagtctgctagctgtgcgggtttttttaattaaaaaaccaccatctctgctagaagatggtggccggtgccaacgactgaacttagtcgctacttacactacttgtgattgttcagcttgtcttctactaggagcagaatgacaccaacaagtagtggcgcgatgatcgcaatatcgaaattactcacgagtaatcaccaccttttggcgcggtatcacgcgaaaaggcgtagcgactgaatcagtataccaaaaagcaggttataacttcttaactgccttctaaaattaggcaactttcattatcgaccgctattggtcgacacaatgactgcttttctaacgcactaactcatgaaatgacctctgcaagtgtagaggtcatttgttatttcgctcaccaaacaagcgttgccaaaaagttacaggtttatcggcactattttcaaccgcttttggcactcctgaggcccgtgcatggatttgctcgtctttttctttggaatcactctcacgctcatttttcgttttttcaagctgcttgagcttttgtgcggtcatcaactgaagctgttgtgactgatcgagcaacttttgcaatttttctatttgctggtctttggcggcaaactgtttgtcacgatctgctctcaaataagtgatttcgtctttcatagtagcaataatgtcaatattatttttgtcgctatttgtcgacgtttggcgatctttttggtggttatttggtggcaaagtctttgctattttattgcgtataatcctttctaaatcggagctgatcagattgcgtccttggctatctttttgtcgcttatttgctggtagtctttggtagtgatactggattgtctgtttgctaacacctagctcatccgcaagctctttgactgttttgttcatatggctgtcctcatctcgtgcaatctaatgtcaattatagcaatggctacacacgactacccataaaaatacccgaaacgatcccagaaatcgtttcgggtcacttatttgaatcggattttaggctttgtttcaagatgtttctggacgatccgttagggtagaccctattgtgctcttagtggtgtctcttttttagtcactctttggtaatcaacgattccatatgttttattaacagtgattttaatgatttgcccagatttaaacgggcctatatcgtgctcatctgtttttaacttgagattctttatttttccctgtgcgttcttagcagctccttcgtaagtgtatccttgaatcgatattccaacaggtacttcaacgtttgaaataataggctgactatcaatcttcatgtagtaagaatcaccaccatattgatactcagtgatataaaccgaaaaagcaattgttgcaacaattgcagccaaaaaggatgtcagccacagtctctccttatgattctcattcatgctaccatctcccatgacagtctttgtaaagtatagatatgtagcctatctgatgtatttagcttatggataacagtctttccttgaacttttatttatttaagttcctatgctgtaatgatcgcataaatttttgttcgtaattccagcataggagtctttattaaaaaagtttattatgaagtcggcccaaaagatcacgctctaacggatctatctttaaaagcttatctgttgataatcatttgagcttaatgtatatcttctatactcaatgagtcgatctgatgcaaatattccaaaaagagcatttaatcagctcctttaaatcgctaaaaattccaaaactcattgccaccagctaccatgtatctatctaaccattttgagaaagagagatcaaagcattggctggcctgcatccctggatatgttaaatacggcttacctagtctgcgctgttcctcgttaatatacatgtcaccaacatctctaatatgcataatcgggatcatattattaaaacttttgggcaatgccttccgctcagcaatcactttgtcaattgaatacacttcactggcatatcccatcgggaaacctgatatttctgtgtaaaatagaaacattccgttcgaaattgaaagaaactcaatataatctgttggcaagttaaggttctttagtcttgctaactcaacaacgttcgctgattcctcaaatttaaaagaaacattttgtacataaccttgtaactgaatgattgagattgtttttttgccattatccgtcagtttctttagtgattgcatccttcgtcgaattaatgattccaaacatgctccccctaataattatggatctggtgcaaacagtgtgagagatgaccatctaaccggctattgatcctatgttgaaggttatgcagctaacaatgcttctaattcgtccacgactgagaacccgatgagacttaactctcgtcgggttcttttgcgtattgcgtgaacaatttccacaccgctcaacgttgcactagcggttcgaatgctttgaaagcttgctgagcggacacgatgacgtttaatgaatcggtggtcctgttcaatcaaattatttcgatatttggaacattggtgggttgatttgctcaaatagtcttgctttatcaggtgcttcactgctttcagtgttgcccgatattgatcagtgactaatcgatcaggccgaccattggtcgtcaagagacgcttcaaaaagtgataggatgcggtataatcgcggtgttttcgtagctcaaaatccatggtcaaaccgttactgtcaatagcgcgatacaaataggcccaacggcctttaactcgaatataggtctcatcgattcgccaacttttagcgtgagctgtttgatgccgacgccatagagccttaaagatggggccatagtgatgaacccaacgcatgaccgtggtgtgatgaacagtgatacccccatcccgaagcaattcaacgatgtcacgatagctgagactgaatctgaaatagtagccaacggctactaagatgatgtccttttgaaagtggcgtcccttaaagtgattcatgcgcgcaatccctcgtttcttggcacccagtatactaaaatcaagtcagtgaggaaaatttgcaccagaaccatgttacaattccacttagaagggaagtgtttattatgttagaaaaaagcgcagatttaggagactacggtccagcaccctttgcacctgatttaaaatcggctgctttggaaaatgaaaattatcgaactactttgtggaccggggatcattttcaaatcacattaatggctatcccagccggaggtggtgatattggtatggaaattcatcatggtaatgatcaacttatttacttagtagccggtattggccacgttaaaatggggaaagataaagatcatttaacagttgatcaggaaattcatccgggagaggctgtagttgttcctgataacacttggcataacgtgatcaacgctggaaaacagaccatgaaggtcttctctatttattcaccggtcaagcaccaaaaaggaactaatgaagccactaaagccgatgcaattaagcaggagggccctctggagggtactggtgaataagacaaattatttatcaaaagatatgatttatgtcaagaactaatggatctggtgcaaacagtgtgagagatgaccatctaaccggctattgatcctatgttgaaggttatgcagctaacaatgcttctaattcgtccacgactgagaacccgatgagacttaactctcgtcgggttcttttgcgtattgcgtgaacaatttccacaccgctcaacgttgcactagcggttcgaatgctttgaaagcttgctgagcggacacgatgacgtttaatgaatcggtggtcctgttcaatcaaattatttcgatatttggaacattggtgggctgatttgctcaaatagtcttgctttatcaggtgcttcactgctttcagtgttgcccgatattgatcagtgactaatcgatcaggccgaccattggtcgtcaagagacgcttcaaaaagtgataggatgcggtataatcgcggtgttttcgtagctcaaaatccatggtcaaaccgttactgtcaatagcgcgatacaaataggcccaacggcctttaactcgaatataggtctcatcgattcgccaacttttagcgtgagctgtttgatgccgacgccatagagccttaaagatggggccatagtgatgaacccaacgcatgaccgtggtgtgatgaacagtgataccccgatcccgaagcaattcaacgatgtcacgatagctgagactgaatctgaaatagtagccaacggctactaagatgatgtccttttgaaagtggcgtccttaaagtgattcatgcgcgcaatccctcgtttcttggcacccagtatactaaaatcaagtcagcgaggaaaatttgcaccagaaccataaaaaatgcttttttaacgtttttctactgtcgcgagatttgcaagtgtacgtacacttgcgatgaattgacagaatctcagctgcgctgatcgtcaattttgtttggggtcacgcccccaatccccatgttattttgaagagaggtgagtccctccttcaaaatcaaaatttaaagagcttctgatgacatcttttcgctgaccttcgcatgatgttacacgtgatgttgatatatccttgcatttagagtttcgttcaagttgaacatcgtgtaatatatgagttgcgtttaggaaacaggtcagtttatattcatgcaactttgaagatacggttaatgcaacgttttgttgcgtgacaagcatctcgatattttctgttaaagcaacatctatgattcaattcgagcaactcgatatacacatcttgtgttgcagacaagccactatagagttgtgtacgctgcaacgccaaaaatcgttcgtttatgaccaataagcgaataatcttgctcaggtgtcgtaaaaagctatttacgtgtagtgaatggcgctagcccttgtcgtaactggcataatccacgtgtagtaaaacgcgttttactacacgctcgaaattttttcacgtggagtgaaacgtgttttactacaccttttgaccccaacgtgctatcacggcaaaccaaaccgcactgcggtttaccccaattttggggtcagttttgccttatgctcttgcttgattttaggagcgttccgaacggcctcaaaaagtggtcgatccagccgaactaatttttgagatggattggatcgcaactcaatttattttgatcttttacccgggaaaaaacgttcaagtttcgaccagggtcgttgcaactgtttgccaaaaatcgtccggcaacgtgacgccattttaacgtcgtgttggtttgccagacgaccgttcatcatcaccattcaggaggtttttgag
